United States Patent Application Publication US 2024/0117295 A1 - sequence listing, part 10

SEQ ID NO: 7 - DNA, 3977487 bp, Artificial Sequence (residues 1,988,745-3,977,487 of 3,977,487)
  Synthetic E.coli genome
gccgtaatggtctgggtgatttggggcgtgatcgttaatgcctggtttattccagaaattgccagccagttcttcaccatgggtctggtgattggcatcatcggcgttgttttccgccttaacggcatgacggttaataccatggctagttcctttaccgaaggggcgcgaatgatgatcgcccctgccctgctggtgggtttcgccaaagggattttgctgctggtcggtaatggtgaagcgggtgatgccagcgtgttaaataccatcctcaacagcattgccaatgccattagcggtctggacaacgcggtcgcggcctggtttatgttgctcttccaggcggtatttaatttcttcgtgacgtccggttctggtcaggcggcgttaaccatgccgttactggcaccgcttggcgatctggtcggtgttaaccgtcaggttaccgtgctggcgttccagtttggtgatggcttcagtcacatcatttacccaaccagtgcgagcttaatggcaacgctcggtgtgtgcagggtggacttccgtaactggctgaaggtgggcgcgaccctacttggactgctgtttattatgtccagcgtcgtagtgatcggcgctcagttgatgggctaccactaaaaatgttaagagccgcaattgcggctcttttttcattctgccgtttcagtctctacggcttcatttttggcattgcgcttcatccacaacgctagcgctttcaggctgtctggagtgaactcatcgcagcgtgcggtgatttcttccggcgtcagccagcaaacttcactgacttcatcttcctgtagtgcgaagggaccgtgagagacgcagctgaacaatgcgccccagacacggcaatttttatcttcgaaatagaactgcccgtgctcggcaaaggggacaccggcaatgcccaactcttcttccgcttcgcgacgcgcggattccagcagttgctcatcggcctggactacaccgcctgcggtcgcatctaacatgccgggtaaaaagtcttttgtctcggtacgacgctggaccagaattttgcccatgccatcatgcacgacgatgtaagttgcacgatgacgcagacactgtgcccgcatttgttcccggctggcttgtgcaatgacttcgttctcttcattgacaatatccacccattcagtacttgccaaacgacgctgttccattatcaggaaaccttctttttctggcgctcttacggcgcattttgagttgtgggtaaattacggattaatcgcgacctgcgcaatgatactttgatcattgagtgcgattacactaagtacgtcattatccagcatgccataactcgccggattaccgcctttcggaatactcacgctgccggggttgaagtggaaaatctccccccgctgttctgccactggcagatgggtatgaccgtacaccagcacatcgttctggtttaaagcaggcagattttccgggccaaaaagatgaccatgcgtcaaaaacagacgttgtttttccagtaatacctgttgccacggcgcggttatcgggaaatgcagcagcatttgatccacttcgctgtcgcagttgccgcgcacagcgataaccttatgtgccacttcattaagccgttcagcgactttggctggcgcgtaaccctccggtaaagcattacgcgggccgtgattcaacacgtcgccaaggatcaccagccactgggcaccgctttgggcaaacaactccagaacacgttccgtcgccggtaagctcccatgaatgtcgcttgcaaacatcagtttcatcactcactcctcgtcgaaaaaacgtaagctatgatactggattctgtcgttgctatcagccagattgcttcgcgctaagtgcaataaaacgctggacagacgctcgctgccactggaatgttgcataatccaccaggcgttctggcacctcatcgccatgtagtaccaggcggttaatcattagcgccagatcagtatcagcaatgcaccattcaccaaataaattcggctgacccagtactaacaaatgttctgccatcgcgaacagtttctctgcactggcttttccctcggccgttagtggcgcttttttcgcccccgcaaagacaacatccgtcggacgctcttcgcggatgggcatcagatcgctgcgcagccaggcctgaatctgtcgtgcacgcgcacgattttctaaatcaagcggataaatacgttcccaggtcggtgacgcaaatcgatcttccagatactccgcaatggcagaagattcactcaactcaaaatcatcgatttgtaataacggcacacggcgtgtctgaccgtaaccttgccacgtcggctgcaaatgttcaccgctgtcgaggtcgatggtcttgatatgaaagctcaggcctttttcctgcaacgccacccaggcggataacacataaggggagaaaaagtgggcatcactccaaagcgtgatagcgggtttactcattatgtcctcggcaataaagggggctggctatcaaactatagagcctttttgtcactgtcacgtgacgaatactcacgtaagtcgccgcgctttctatacttgtggtgttcagatgattaaacaaccggagctgcaatgatcgatctctatttcgccccgacacccaatggtcacaaaattacgctgtttctcgaagaagcagagctggattatcgcttgattaaggtagacctggggaaaggcggtcagtttcgtccggaatttttgcgcattagccccaacaacaaaattccggcaattgttgatcattctcctgccgatggcggcgaaccgctaagcctctttgagtctggtgccattttgttgtatctggctgagaaaacaggactctttttgagtcatgaaacgcgtgagcgcgccgccacattacagtggttattctggcaggtaggcggactggggccgatgcttgggcaaaatcatcattttaatcacgcagccccccaaaccattccttacgctattgaacgttatcaggttgaaactcagcgtctttaccatgtactgaacaagcggctggaaaacagcccctggctgggaggcgagaactacagcattgcggatattgcctgctggccgtgggttaatgcctggactcgccagcgaattgacctagcaatgtatccggcagtcaagaactggcatgagcggatccgtagccgccctgccaccgggcaggcactgctaaaagcacaactcggtgatgagcgtagcgatagttaacagaaacaggttctcgtgtattatttcatcctaagtaaaacaacggagaacctgcaatggcacaacctgccgctattattcgtataaagaaccttcgtttgcgtacgtttatcggaattaaggaagaagaaattaacaaccgtcaggatattgttatcaatgtgacgatccactaccccgccgataaagcgcgcactagcgaagatatcaacgatgcgctgaattatcgcaccgtaacgaaaaacattattcagcatgtagagaataaccgtttctctttgctggaaaaattaactcaggatgtgctcgatatcgcacgtgaacatcactgggtgacgtatgctgaagtggagatcgataaactgcacgcgctgcgctacgccgatagcgtatccatgaccttaagctggcagcgttaatcgccatatcgggaggctgcatgaacatagtgatcaccggagggacaggattaattggtcgccatttgattccgcgtttgctggagctgggccatcaaattacggtagtgacgcgtaacccgcagaaagccagttccgttctcggccctcgggtgacactatggcaagggcttgccgatcaaagcaacctcaacggcgttgatgcggtaatcaacctggccggagaaccgattgctgataaacgctggactcacgagcaaaaagagcgtctctgccaaagccgctggaatatcacgcaaaaactggtcgatttgattaatgccagcgacacgccaccgagcgtactcatttccggcagcgcaacgggctattatggtgacttaggtgaagtggtggttaccgaagaggaaccgccgcataacgaatttacccataaactctgcgctcgctgggaagaaattgcctgccgggcgcaaagtgacaaaacgcgagtgtgcctgctgcgtaccggtgtagtgctggcaccggatggcggtattctcggtaaaatgctgccgccgtttcgtcttggcctgggcgggccgattggctctggtcggcagtatctggcctggattcatattgatgatatggtcaacggtattctctggctgctggataacgagctgcgcgggccatttaatatggttagcccctacccggtacgcaatgaacaatttgcccatgcgctcggtcatgcgctgcatcgcccggccattttgcgcgtccccgcgaccgccattcgactgttaatgggcgaatctagtgtactggtattaggtggacaacgcgcgctgcctaaacggctggaagaagcgggttttgcgtttcgctggtacgatttagaagaggcgctggcggatgtcgttcgctgatgtggtttacagcaaacatccgccagttaactcccggtgttacaggattagtggctttgcgcgataagatcgtctggactaagtcgggtcaccatcataactaactctctgtctaaacctctatccagcatctcctgagcaatacgcagggcttcttcgtgtttgccctgcattgcgccttcttcacgtaatctgtcagcaatggtcatcagtttctccttttcttgtggtgcgcgttccgctatctcaccaataaatgcacgaaaacgctgggcatcccctgtttgtaatacgtaattaaacagggcttttagctgtctgtcattagtgttccctgtaactagcaggctaacaatttggtcgactaatcccaacagatcgcgctgacgaatatgtttctgaattaactccaacagcgccattttgcggtgttgcataatctcgtcatccggcaccacggtaatatccaccaacggaaaagcgctactatatattttgcgggctatagcaggctcggcaaattcatcaagccagcagagactataaggataaggacttctgcaaccatgataaaacagcatcgggagcaccaatggaagctctttatagcccgcatcaagatggttttgcattgccgcaatggaataacgcatcatgcgaaaagccattaattcttccggcttactttggtgctctatcactacataaatataacccactccctcctgcgttttcacagaccacaagaggtcggaataatattgccgcaggtcttcatcaataaaactgtttggttccagtttaagcgtcgttaaatcacacagtttgcgcagcggcgcgggaagatgaatatcaataaaatcccgcgcggtgtctggatggcgtaaaaaagatttaaataccgcatcatgcggcgtggaagttgtgcttattgtcatggcgttccgtcacccctcaaatttaagatgacgcgacaataaccacgattaacacccaatgcagcaggcagtttttatctttggacagcgaattcagaagtatttttagcggactgtaacttttacatttcagcggaagctgactcgcaaattccccatgaaaatactccggcagcgttagccaccggagaggaaattatttcaggcttcccttaaggaaccgttgcagacgagggctttgcgggttgccaaataactgctccggcgcgccctcttcttctattttcccctgatggaggaaaatgacatgagtagaaacatggcgagcaaagcccatttcgtgagtcactaccaccatggttttcccctcttctgccagttgctgcataatacgcaacacttcgcctaccagttcaggatcgagcgcgctggtaggttcatcaaacagtaaaacttccggttccatcgccagcgcccgcgcgatagaaacacgctgttgctgaccgccggaaagatgcaccggatatttcccctgcgcacgttcgtctatcccgacttttgccagatacttcaccgcccgctcgcgcgcttcctgcttgctcaggcccaacacctgaatcggcgcttccatgacgttttccagcaccgtcatatggctccagagattgaagtgctggaataccatcgtcaggcgtgtgcgcagtaagcgcagttgatttttatcggcgactttgagttgaccgtctttgtcgcgcaccagattgatcgtctggccattgaccacgatgctcccttcactcggtttttcgaggaagttaatgcagcgcagaaaggtacttttcccgcttccgctgcttccgatgatgcttattacatctccggcattcgcttgcagacttacccctttcagcacttcatgttcgccgtagcgtttgtgcaaatcgataacgtttaatttattctcggacatcgtattctcagtgcgtactagaaggtttcacatgctgcaaccagcgtttttccgctctgcgaaagaggctgatcaggacataagagatgattaaatagagcaccgcggcaatgccgaaggcggtaaaaggttgatacgtggcggcgttaatatcgcgggctattttcagcagatccggcaccgtggcagtaaatgccaacgcagtagagtgcagcatcaggatcacttcgttgctgtatgccggtaacgcaatacgcagcgcagaaggcaaaataatgcagcgatacattttaaaagtgctgaagccataggctctggcggcttcaatttccccatgcggaacgctacggattgccccagcaaaaatctcggtagtgtaagcgcaggtgttaagcgtcagcgccagcacggtacagttcaggccactgcggaagaaagcgttaaggaattcggttcccttaacaatctcaagcgtgtacatgccggaatagaacaccagcaactgaacatacagcggcgtaccgcgaaaaatataggtaaataaccagattggaaactggatgtatttattactggagacacgaccaatcgccagaaacagcgccaggactccgcctatcactacgctcaaaataagcagccacagagtgatcgccacaccagtaaagcgataaccgtcggtccacagcagcggtttccagtattcatgtaagatttcgatcacaggtcagccctcttcacacccacggagtagcggcgctcaaggaacagcagcacaccattggaaacagtggtgaaaaccaggtaaatcacgccacagacgatggcgaaatagaacggttcccaggtacttttgcctgccagttgggtggctttgaccacatcttccaggccgagtaagctaaccagtgcggtagatttgaggatcacctgccagttgttgccaatgcctggcagggcgtaacgcatcatgctcggaaacatgatccgccgaaacacttgcccacgagtaaaaccgaacgccgtcgccgcctctatatgtcctttcggcactgccataaaagcaccacggaacgtttcggtaaaataagcaccgtagataaaaccgagagtgataataccagcgaccatcggatcgatatcaatctgcccgacgcccatcgcctccgtcaccgtgtttagcgcaatctgcaaaccgtagaaaatcagcagcatcaacactaagtccggcacgccacgaatcagcgtggtgtacccttcgaaaatcagcccgctaagccgattttggctgagcttaccgccagcgccaattaaaccgatgattacagcgagcactacagagctgatagccagctccagcgtgacgagcgcaccctgtaaaataacaccactaaacccatacaacatgctgcctgtcctgtcgtgtgtggtgaattaccgcctcttgtctccctccggttacccgaagggagcgggctttctttcaccgatggcgattagccaccataaacatcaaaatcgaagtactttttcgctaatttctcgtaagtaccgtcagcgcgcatttcggcaaaggctttgttcagtgcttcgcgcagttcgttatcttctttacgcaggcccatgccggtccctacgccaaacagtttttcatctttaacagacgggccaccgaatttgtaatctttaccgacaggttgtttgaggaaaccttcgctggcagcgacctcatcctggaacgcggcatcaatacgtccggcagtcaggtcagaataaatgttgtcctgcccctgatagctgacgatttcaatgccttttggtgcccaatgttcattaccgaacgtctcctgggtggtgccctgcaatacgcctacccgtttgcctttcaggctctcgactgtcggctgaatgtcagaatttttcgccaccaccaaacgagaatcggcagcgtacagtttgtcggtgaaggctatttcttgctgacgtttttccgtaatggaaaggctactcatgatggcgtcaatcttcttcgcttttaaggacgggattaacgcatccagcggattttcgacaaacgtacattgcgtattgatgcgtttgcataattcctttgccagatcgatatcgaagccaaccagttcgccttgactatttttactttcaaatggcgcataggtcgggtcggtaccgatgcggatgttttgcggaatcgcagcaaacgccgcagttgcgctggagaaggccagaaccagagagaggcttagcaccagttttttcataatgtcctcaactgacagtctttttatagggaatatttacaggtttgttacacttatcgtgccataaaattgaccatcaaggcaaaatatcccgccccgttagacgtattatttttcattaaaaatgcttaagtatgcatttcaatgcaccacgatagtgcaacaaacctggcgtgcaccatgatgatcattccatcaggtacagcttcccagcgacgtatcagtcaccgtagacattaaagtcgaaatactttttcgccatcttgtcgtaggtgccgtcctgacgcagctcgccaagcgccttattgaaggcagccgtcagttcagcatcatctttacgtagccctacaccggtgccatcaccgaagtattttttgtcttttacactactgccagcaaaggcgaaatctttaccagcaggttgcttgaggaatccttcgctggcagcaacttcatcttgtaacgcagcatccagacgtcctgcagccagatcggaatagaccaaatcctggttggcataggccaccacatccacgcctttactacgccaggtctcgttagcgtaagcttcctgggtacttccctgcagcacaccaacatgtttacctttcagactatccagcgttggctgaatcggactacctttggccgcaatcaaacgagaatctgcggcgtacagcttgtcggagaaggcaatctcctgctgacgtttatcggtaatggaaaggctgctaataatagcgtcgatttttttcgctttcagactggggatcagcgcgtcaaagtcactggcaacccaggtacatttcacctgcatccgtttgcacatctcgttaccgagatcgatatcaaagccaacaaaatcacctttagcatctttgctactgaacggtgcgtaggtggtatcggttccgatacgtaccgtctccggtagcgccgcatagctggaagccgctgtggagagaccgactaacaaagacagagcgagaatgctcttcttcatacataaccctcaagtgaaaatggcttttttatgttgtgtattgtgttgtgtgtttgcaggctctttcatgcaggtcttatgccatcttgacgacaacagtaacattcaacgttaaatatgttaataagacgttgcattattgtcctgaagttgaagatagcaggtatagcggttgaatcgcagcgtttcgattgaatggcagaaacaaaatgtcgaggatttgatcgcggttgcaaaattgccctgaaacagggcaacagcggagttatgcgccctgccagcgggcaaagagatcttcaggaagggttatcgcaaactggtcaagaacacgattaaccgtctgatttatcacatcatcaagggattgcgggcgatgataaaacgccggaacgggaggcataatcaccgcaccgatttctgccgcctgagtcattaaacgcagatggcctaagtgcaatggtgtttcacgcacgcagagcaccaacgggcgacgctctttcagcaccacatctgccgcacgggtcagtaagccatcagtatagctatggacaatgccggaaagggttttgatactacagggtaaaatcaccatccccagcgtctggaaagaaccggaagagatgctggcggcaatatcgcgcgcatcgtgcgtgacatcggctaatgcctgcacttcgcgcagagaaaaatccgtttcgagggataaggtctggcgcgctgcctggctcatcaccagatgcgtttcgatatctgtgacatcgcgcagaacctgtaataagcgcacgccataaatcgcgccgctggcaccgctgatgcctacaatgagtcgtttcataaatagttgccctgtcagacttgcaggcagactttgcaggatttcggcgggagttgcaagtcagggtgccagaccggcaccctcagcgaaggcatcatccttcgttatgcatttcgagattttccacttcgttctgacgttgcactgctttggcgtcatcattacgtaacgtatcgaggaaatcgaggtagccctgatcaacatctttggtgacgtagacgccgttgaacacgctgcattcaaactgctggatatccggattttcagcgcgaacggcgtcgatcagatcgttcagatcctggaaaatcaacccgtcagcaccgatgatctggcgaatttcatcaacttcgcgaccgtgagcgatcagttccgtggcgctcggcatatcaataccataaacgttcgggaagcgaatttccggtgccgcagaagcgaggtacactttcttcgctccggcttcgcgtgccatctcgataatctgctcagaagtggtgccacggacgatggagtcgtcgaccagcaggacgtttttatcgcggaactcggcgcggttggcattcagtttacggcgcacggacttacgacgcagctgctggcccggcatgataaaggtgcggccaacatagcggtttttaacgaagccctggcggtacggtttgcccagaatacgagcaatttccagcgcgatatcacagctggtttctgggatcgggatcaccacgtcgatatccagatcttcccattcgcgggcaattttctcgcccagtttcgtgcccatattcacacgcgcgctgtaaacggaaattttgtcgataaagctgtccgggcgggcaaagtatacatactcaaacaggcacggattgctgaccggattgtcagcacattgacgggtaaacaactgcccttcttcagtgatgtaaatcgcttcgcccggcgcgacgtcacgcaggaaatcaaagcccagcgtatcgagcgctacgctttcggaagcgaccatatattctgtacggttctcgtcaatatcacgttttcccagtaccagcggacgaatcccgtttggatcgcggaaagcaaccataccgtggccgataatcatcgccacacaggcatacgcgccgcggattaagcggtttgtggcagcaatggcagcgaaaatattgtcggcttccagcgggtagtggcggaagttgtccagctcgctggcgaagatattaagcagaatttcgctgtcggaagtggtgttgatgtggcggcgtttttcttcaaacagttttttacgcaactcgtgagcgttggtcagattgccgttgtgggcaagcgtaatgccatacggggagttaacgtaaaacggctgcgcttcagaggcgctggagctgccagccgtggggtaacgcacatgaccaatgcccatattgccctgcaaacgctgcatatggcgagcttcaaatacatcgctcaccagcccgttcgctttacgcaaacggaagcagttattggcatctatggtgatgatgccggcggcatcctgaccgcgatgctgaagcaccgttaaggcatcataaatgctctggttaaccggcataacaccggcgataccgacaataccgcacatacgtctttttcctcgttaagccacatctcagagcacttacgctctgggcaagaaactactgctgctttgcagataatcaaaaaaacatctgatgataaaactgaattgcgggatcagctgacttttgctccagtcttcgcttttgctcaccccggtaaaggagtcgagaaagaagagaatggcagcaacaatcaacacaccgcgcaacgcaccgaaacagacgcccagcacccgatcggtgccactcaaccccgttttctccaccaactggcctatcacgaagttcacgatagcaccaacgatcagggtagcgataaacagtaccgcgatggcaatcccatttcgaaccagttcgtcttcaaagcccgtaaaccagacactcaggtaagtgtagtaatgactggcaacaaagaaagcacaaccccatgtcaccaggcttaacgcttcacgaacaaagccgcggatcaggctaaccagagaggaaaaagcaatcaccgcgattatggcgtaatcaatccagaccatatgtgtcccacgattttacgccctgtcatcctgttcggggcgcattctaacagaaaaagaaaacgtttgcgtagggatttccttcccgcgcatcaataaaaatggcgctgaaaaaatattcaacgccatcgactttttatgcctttgcggcatcgggcaatgcgtgtcggatgcggcgtaaacgccttatccgacctacggttctacccctgcgtaggcctgataagacgcgccagcgtcgcatcaggcaagaccgtattaattcggcgtatagcccattaccacgccacttaagccagaaagttgcttcaactcacccaggctacctttcagcttatctttgctggcatccggcccaaccagaatacgggtaattttaccctgcactggcgtggatgggctcgtataaacccgataaccggcaccgcgcagcttaccgacaatctcattcactttatcggcatttttcagcgcacccagttgcacaacataggctttacccgtcggtgcagctttttcttccacgaccggcttcggttctggcttcggcgcaggtggtgcttcaacctttggtttaggcggctccaccggtttcggcttcggtggggcgaccggtgcaggttccggttcaaactcggtgttattggctgcaatagtggccggatcgaggctcggtgctgcggcatcacctgcccgcacctcttccgctgcgccttccggcggctgcgtcggtaacgcctgggtggcggctggcatcatatcaggctcatcacgatcgcccgctttcggcaccagcgggatagccgcgaactcatcctgataatgttttttctgcccgtccagcagccctggaagtacaatcacccccagcgccaccagcacgatcgtgcccactaaccgattctgaaacttacttgccaccgcttctcctcgcgtcaatcacttccatgacatgtgcgaccgtgtggaaagaaccacacaccagcacggtgtcttccgctttagcgtccgccattgcggcatcccatgcctgcgcaacgctatcaaaacttttgccgttacccaaatgctcaagcagttgttctgccgtggcaccgcgcggcccttccagtggcgcacaataccagtcatcaaccacgcttttcaaccaggccagagttccggcaatatctttatcatgtagcataccgataaccgccagcacgcgcccgtttttcggtagcgctttcatacgcccggtgagatattccgccgcatgtggattatgcgcgacatcaaaaataacgcgtgggctctcgctcacaatctggaaacgtcccggcaaaattgcgctggcaatcccgtcgcgaatggcattttcactgacttccagcccgctggcacgcagtgccgccagcgctgttgcggcattcggttgcgggacaagcggcaacggcagattttccagcgtgccgtgagcatcgctaaacgcccagtcatgatcggtgacggaatagttccactcaacgccccgacgttgtaacagtgcacctttttcctgcgccacatcagcaatggtagaaggcatttccggctcaccgacaattgccggtttttcgctgcggaagatgcctgctttctcgcgaccaatactttcgcgatctggacccagccagtcggtatgatccagcgcaatactggttactaccgcgacatcggcgtcgacaatattggttgcgtccagacgaccgcccagccctacttccagaatcaccacgtcaagttgtgcctgcttgaacagccacaacgcgctcagcgtaccgtactcgaaataggtcagggaaatatcaccgcgtgcgctttcaatctccgcaaaagaggcggtgtgggcgctttccggcaattcctggccctgcacacgtacgcgctcggtataacgcaccagatgagggctactgtagacgcccactttgtaccctgccgccatcagaatgctctccagcgtacggcaggtggtgcctttgccattcgtacccgcaacggtaaacacaaatggcgctggtttcaggacgccaagacgcgccgcgaccaggctcacgcgctcaaggccgagatcgatagttttactgtgcaggttttccagataagaaagccagctagccagagggctcgcggcttgaggagtgcgtttgataatcatggtatccgctgattcgttacggtgagaatagcaaaagggcagagccagtggccctgcccttatcagttatcaggcctcaggttcctgatccggtaccgggggtaccactacgccttcacgcggcgcttcaggattcggcgctggcagattcatcaacttcgccagaatgctcgccagtttcaggcgcatttccggacgacggacgatcatgtcgatcgcgcctttctcgatcaggaattcactgcgctggaatccaggcggcagtttttcgcgaacggtctgttcgataacacgcggaccggcaaagccgattaacgctttcggttcagcgatgttgagatcgcccagcatggcgaaacttgcagaaacaccgcccatcgtcgggtcggtcagcacggagatgtacggcaagccgcgctcctgcatttttgccagtgccgcagaggttttcgccatctgcatcaggctcatcagtgcttcctgcatacgtgcgccaccagaggcggagaagcagatcagcgggcagttatcttccagcgcctgctcaacggcacgcacgaaacgtgcacccacaacagaccccatactaccgcccataaaggcgaactcgaatgccgcagcgacaaccggcattccatacagagtgcctttcatcaccaccagcgcatctttttcgccggtttctttctgcgcagatgccagacggtctttatacttcttggagtcacgaaacttcagcacatctttcggctcaagctcgctacccagctccacaaggcttccttcatctaacaggctatgcaggcgattacgcgctgtcatacgcatgtgatggtcacacttcggacagacctcaagattacgttccagctcagcgcggtataaaacctgaccgcagctatcacacttagtccacaccccttcaggaatgctcgccttgcgggtgggagtaatgttgcttttaattcgttcaatccagctcattagggacctttctgtctgaacctggttcgatgccagttttatctttggggacgcataatgccatttttgcccccaacagaccatgaatgttgcacattaaaacataacagcccgaaactttggataaaaaagtggtcgaaccgcggagttactttttattttgcggcgcgtgccgcagcgcgtttgtgacggattatttcgatgacgcccggcaaaatagaaaccacaataatcccgacgatcagcagcttaaggttatcctgaaccatcgggattgtaccgaagaaatagcctgcgtaggtaaaaagcagtacccacaacagtgcgccgatcacgttataagcggcgaaatgacggtagctcatgtggcccattcccgcaacaaacggggcgaacgttctgacgatcggcacaaaacgggcgagaataatcgttttgccgccatgtttctcataaaactgatgggttttgtcgagataactgcgacggaaaattttgctattgggattactgaacaacttttcaccgaacaaccgcccgatagtgtaattgaccgcgtcacccacaatcgcggcgatcagcatcagcaccaccatcatatggacgttgagatcgttggtttccagacttgccaacgctccggcaacaaacagcaaactatcacccggtaaaaacggcgttaccaccagaccggtttcacagaacaaaattaagaacaaaatggcataaacccagacgccgtactccgcgaccagctctgccagatgcacgtcaatgtgcaggataaaatcgatgaggaaataaatcaggtccatatttgcctatgccttgtactcgtcatctttcaggctgtaactacgttggctacagcctgaaatgttccgagcattattctcgttagtccgccagaaatagcgggcccattggcggttttggaagatcataccggtcagggtaatccaccgcgaccagatacagcccttccgcttttgccgttgctgccgccagcgttctgtcctttgccgccagcaactctgctatccagctctccggctggttgtgggcaccgacttccatcaggctgccgacaatattcctgaccatatgatgtacaaaagcattcgctttaatatctaccaccacataaggaccgtgacgcgtgacattaatatgcataacgttgcgccacggggttcgggactggcactgcaccgcacggaagctggtgaaatcattctcgcccagcaagcattgcgcagcccgatgcatccgttcagcgtccagcggttcgtaaaaatgggttacccctttactcagtaccgccgggcgcagccgatgattgtagatgatgtagcgataacggcgagccgtggcgctaaatcgggcatgaaaatcatcaggtacagttttaacccaacgcacagcgatgtcaccaggtaaattcgcatttacgcccaaggtccacgccgcgtctttgcgcagcgcggttgtttcgaaatgcacaacctgcccggtaccgtgtacccctgcgtcagtacgcccggcgcagaagacggtgatgggttcgttcgccacctgggagagcgccttttccagcttctcctgcacactgcggacttcgttctgccgttgccagccgtaatacttactgccgtcgtactcaatgcccagcgcaattttataaactggcggttgttgctggtcggacattagtacagatactcctgcaccagtttctcggcgatttttactgccatcagcgcgccgccaaagcgaacgttatcggccacgctccagaactggacttgctccggcataccgtagtcattacgcacgcagccaacagaaagatgcggcgtaccgctagcatcacctacctgagttgggaattcgttctcttcagagagcacaatatcttcgccttgaacaaacgcatcacgcgcttcttctgctgccagtggacgcagagcttcaaagttgaccatctgggcatgaccgtagaataccggtgcctggacgacgctagcgctaatcatcagcccttcgtcctgcaggattttgcgtacttcgtcaacgatacgacgttcttcacgcacgctaccttcgctatccggcagtaacggcagcatgttgaacgccagctgacgcccgaagaaatcttcttcgtcaatcggaatgccgttgagcaatttcgcactctgccccgctaacgcatcgaccgcttttttgccctgggcggaggcactaatcaggctggtaacgctgatacgacttaaaccgccctgatcgattaacggtttcagtgccgccagcagctggctggtcagactgtctggtacggcgatgacattccggttccggtaatctgtcagtacaaacgggtttacttccggcaccaccagcggtacgtcgggttcgagagcaaacaatccactgctgtcgatcaccaggcaaccactgttggtcgcttcttcaacccaggcagcggtagcttctttgcctgcgacaaaaaatgccagctgcgcctgcgtccagtcgaattcagcggcatcctgcacggtgattgtcttaccaccaaagcgcagttgttcgcctgcgctttcgttacgtgccagtgcataaatttccccaaccgggaactgacgttcagccagcgtttcaagcagggcttcgcccacagcgccagttgcgcccaggacggcaatgttccagccttcagacatggtggtttactccagaaatagcaaagctccctgccaatgttacagcagagagcatgaagaagagattaacgtgccggatgatgaacggcgttaaaacccagtttacacagcaaacttgccgcactggcgtcatcacaaattacatacagagaactccattcacggcgctcaagatagtttttgcgcagtttatcgaactcacccggtatcccggcgactttacgcagcggtgcgtcatcgcggcgcacatcatacaccaaatgcaccagccttttcagcgtcggttgatcgagcgggccatgcagcgtaatgcgaccaaactctggcgcaggcagtaatgtatccagcgcaacgtgctgttcatgcccaataaacttgctataagcttcaaacacttgcgtagtaccgcgtgctttaccttccagggtatagcctgcgatatggctcgtgccgatatccacttttttcagcagctcgacgttgagttccggttcgccttcccagacatccagcactacgcttaacttctggccttcattcaggcaggtcagcaacgcagtattatcgacgactgcgccacggcaggcgttaatcagaatcgctccgggcttcaggctacggatcagtttttcatccgccagatgtagcgttttgtacggaccatctttaaagagtggcgtatggaaagtcagaatatccgcgcgctggactaactcatccaggctgcggaaatcaccctcatccccacggtcggcgcgaggcggatcgcaaagtaaggttttaatccctaacgcttccagtcgcgcctgcaatcgacgtccaacgttaccaacgcccacgatccccaccgtacggtcgtacagactaaatccatcgcgttcggcaagcatcagcagggaggagaaaacatattccaccaccgcaatcgcattacagccaggtgcagcggaaaaaccaattcccgcctgcttcaaccatgcttcatcgacatggtcggtccccgcagtggcagtgccaacaaatttaatgggttttcctgccagcaaagattcattcactttcgtgacgctacgcaccatcagcgcatccgcgtctgccagttgagcgacggggattggacgcccgggaaccgcggtcacctcacccaaacggctaaataagtcgcgggcataaggcatattttcatcaacaaggattttcacgtttgtgttacctgtatgagacgagagttaaccggacaagtgtgccataatctcgcggccaggcatacttgcgaagatttcaggtataaggatacgtaatgatacaacctatttccggccctcctcctgggcaaccaccaggtcagggagataatctgccgtctggcacgggcaatcagcctttatccagtcagcaacgtactagcctggaaagcttaatgacgaaagtgaccagtctgacgcaacagcaaagagcagaactgtgggcgggtatcaggcacgatattggtctgagcggagatagtccgctgcttagccgtcacttccctgccgctgagcataatctggcgcaacgtctgctggccgcgcaaaaaagccattctgcccgccagcttttagcgcaattaggggagtatttacgtctggggaataatcgtcaggcggtcacggattatatccgtcataactttggtcagacgccgctgaatcagctcagtccggagcaattaaaaaccattctcaccctgttgcaggaagggaagatggttattccgcaaccacagcagcgcgaggcgaccgaccgtcctttattaccggcggagcacaatgcgctaaaacagctggtgaccaaacttgcggcggcaacgggggaacccagcaaacagatctggcaaagcatgctggaactttccggggtgaaagatggcgagttaattccagcgaaactgtttaaccatctggtgacctggctacaggcgcgtcagacgctaagccagcaaaatacgccgacgctggaaagtctacagatgacgctaaaacaacctttagatgccagtgaactggcggcgttaagcgcatatatccagcaaaaatatggtctttctgcgcaaagtagcctttcttctgcccaggccgaggatattcttaatcagctttatcaacggcgggttaaagggattgatccgcgtgttatgcaaccgctgcttaatccttttccaccgatgatggacacgttgcaaaatatggcaacgcgtcccgcgctgtggatactgttagtcgcgattatcctgatgctggtctggctggttcgttaaccccgacgaaaactcagtatcgtgacaataatacccagcaccgcagagatcgccccggcaagaaatacgctagagtaaccaaacgtggtcgccagcattcccgccagcggcccggagacgccgagggcgatatcctgaaacgcggcgtaaccgcccagtgcggtgccgcgaacttgactggggacgcgtttaaccacctccacgcccagcgcaggaaagataaggctacatccggctccggttaacgccgcgcccgctaatgcgacccatgcacctggggcttgccagagcagcaacaagcccaccgtttctacaagcagagagacaatcgccactttcacgccgccaaaacggtccggcatccagccaaacatgacgcgcatcacgacaaatgcgccgccaaacgcggtaagagtaaagcccgccatcgcccatcctttgctggcaaagtagaggctaacgaaagtcccgataacagcaaaaccaacgccttgtagtgccagacctaaccctggtttccagataagcccgacaacgctccacaggcttggacgttctcccgccagggccggtactttgcgcactgtgccgttacaggcccacgccagtacgggtaataccattgtggtgatcgccagtgcggcaaaaccgtaatggctatgaatcaacaggccaagcggagcaccaacagcgagggcaccgtaaatcgccattccgttccaactcatcactttgccagagtgttttggccctacgatgcctagtccccaggtcagagcgcctgtcagtaactggctttcaccaaagccaagaatcaaacgcccgacgaccaacagagcaaatttgaacggtgcggagacaggcaaaatcgccgccagcagcaacgcgccgccagccagaccacaagctaacattccctgaagcgcgctacgttttgcaccatattgatcggccagtcgcccggcgtaaccacgcgtcagcaccgtagccagaaactgaatcccgacggcaatgccgaccatggtattgccatagcccagttcatgatgaacaaacagcgggataaccggcaacggcaaccctacggtcatgtaggtgagaaaaaccgcaaaagcgatgcggaagaggctaaaattggcagaagatcgtgtttcggtttggcttacagcagtcatgcattactccagaatgcagcgcaaggcgaggagtatccccgtctcatctctctggtttcagggttacggtgcgttggcaggatttaacgcgtacgtcttttcagaaggaaatcgacaaagcgggaagtttgcctggaactggcggcgattgtcaatgatgtgaaaaagggaaccatcaggttcccttttgcgttagtgccggaggccgcattggcgcgtaacgtcggatgcgacgctggcgcgtctactccgacctactgcgaattaatctttcagcttgcgcattaccagcgtggcgttggtgccgccgaagccgaagctgttagacataacggtggtcagttcgcgatcggtcgtttcggtcacgatgttcagacccgcagcctgctcgtccagctcttcaatgttgatgctcggggcgataaagccgtgttccagcatcagcagagagtagatagcttcctgtacgccagcagcgcccagagagtgaccggtcatggctttggttgcagaaatcgccgggctcttatcgccgaacacttcacggatagctgccagctctttcacgtcgccaaccggagtgctagtaccgtgggagttcaggtaatcgattggggtatcaacgccatgcatcgccatcttcatgcagcgtactgcgccttcgccagacggagcaaccatgtctgcaccatcagaggttgcgccgtagccaacgatttcagcatagatgtgagcaccacgcgccagcgcgtgttccagctcttcaaccactaccataccgccgccgccagcgataacgaaaccgtcacggtgagcgtcgtaagtacgggaggctttttccggggtgtcgttgtatttagtagacagcgcacccattgcgtcgaattcgcaagccatttcccagcacagctcttcgccgccgccagcaaacacgatgtcctgtttgcccagttggatctgctctactgcgttaccgatacagtgtgcggaagtcgcacacgcggagctgatggagtagttaacgccatgaattttaaacggggtggcgaggcaggcagaaacgccggatgccatcgctttggtgaccacatacgggccaaccgctttcaggccgcgcgggccgcgcattgcgtcagcgccgaacacctggaaacgcggggagccgccgccggaacctgcaatcaggccaacgcgcgggttattctggtaagcttccggagagaggcccgcatcagcgattgcctgctccatagaaaggaatgcataaatggatgcgtcgctcataaagcgcacaactttgcggtcaatgaggccagtggtatccagttttacgttgccccagacgtggctacgcatgccggaatccttcagctcctgagagaaagtgatcccactacgtccttcacgcagagatgccaggacttcctgctggttattaccgatgctggaaacaatgcccaggccagtaatcactgcacgtttcattcaatacctctgtaagtcgcacatagagtaagtttcgaatgcacaatagcgtacacttgtacgccgaacaagtccgatcagccatttaatagagaaatttgcgcagccttacacacatcgctaagatcgagccaccgcctgtaagacgagtaacttacgtgaaacactactccatacaacctgccaacctcgaatttaatgctgagggtacacctgtttcccgagattttgacgatgtctatttttccaacgataacgggctggaagagacgcgttatgtttttctgggaggcaaccaattagaggtacgctttcctgagcatccacatcctctgtttgtggtagcagagagcggcttcggcaccggattaaacttcctgacgctatggcaggcatttgatcagtttcgcgaagcgcatccgcaagcgcaattacaacgcttacatttcattagttttgagaaatttcccctcacccgtgcggatttagccttagcgcatcaacactggccggaactggctccgtgggcagaacaacttcaggcgcagtggccaatgcccttgcccggttgccatcgtttattgctcgatgaaggccgcgtgacgctggatttatggtttggcgatattaacgaactgaccagccaactggacgatagcctaaatcaaaaagtagatgcctggtttctggacggctttgcgccagcgaaaaacccggatatgtggacgcaaaatctgtttaacgccatggcaaggttggcgcgtccgggcggcacgctggcgacatttacgtctgccggttttgtccgccgcggtttgcaggacgccggattcacgatgcaaaaacgtaagggctttgggcgcaaacgggaaatgctttgcggggtgatggaacagacattaccgctcccctgctccgcgccgtggtttaaccgcacgggcagcagcaaacgggaagcggcgattatcggcggtggtattgccagcgcgttgttgagcctggcgctattacggcgcggctggcaggtaacgctttattgcgcggatgaggcccccgcactgggtgcttccggcaatcgccagggggcgctgtatccgttattaagcaaacacgatgaggcgctaaaccgctttttctctaatgcgtttacttttgctcgtcggttttacgaccaattacccgttaaatttgatcatgactggtgcggcgtcacgcagttaggctgggatgagaaaagccagcataaaatcgcacagatgttgagtatggatttacccgcagaactggctgtagccgttgaggcaaatgcggttgaacaaattacgggcgttgcgacaaattgcagcggcattacttatccgcaaggtggttggctgtgcccagcagaactgacccgtaatgtgctggaactggcgcaacagcagggtttgcagatttattatcaatatcagttacagaatttatcccgtaaggatgactgttggttgttgaattttgcaggagatcagcaagcaacacacagcgtagtggtactggcgaacgggcatcaaatcagccgattcagccaaacgagcactctcccggtgtatagcgttgccgggcaggtcagccatattccgacaacgccggaattggcagagctgaagcaggtgctgtgctatgacggttatctcacgccacaaaatccggcgaatcaacatcattgtattggtgccagttatcatcgcggcagcgaagatacggcgtacagtgaggacgatcagcagcagaatcgccagcggttgattgattgtttcccgcaggcacagtgggcaaaagaggttgatgtcagtgataaagaggcgcgctgcggtgtgcgttgtgccacccgcgatcatctgccaatggtaggcaatgttcccgattatgaggcaacactcgtggaatatgcgagcttggcggagcagaaagatgaggcggtaagcgcgccggtttttgacgatctctttatgtttgcggctttaggttctcgcggtttgtgttctgccccgctgtgtgccgagattctggcggcgcagatgagcgacgaaccgattccgatggatgccagtacgctggcggcgttaaacccgaatcggttatgggtgcggaaattgttgaagggtaaagcggttaaggcggggtaatctgctctcgcagtgtttgccggatgcggcgtgaacgccttatccgacctacgtgtgacgtgtaggcctgataagacgcgataagcgtcgcatcaggcatgctgctccagacgccgcaacttactgctgactcgcctgctgaaacaggttttcccacatatcggtcaccagcgcctggtcacgcgggctcaattcaccagcaccaatggctttttccagactctggctaacggtcgtatgcaccgcctgagcggagtggtcatcaccactttccagttctgcgatggctaatgtcaggtggccacgcaaatacccactggcaaacaactcatcatcactggcatggtcaaccataccgtcgattaatgccagaatgcgactttcaaactccgcgatcatcttctttcctcattgtaaaacgtggcgctggcttcagttgagcgcttccggccacgggaactgttccgccgtaagttccggcgtgtgataataattttgtagtgctttaatgaagcgtgccggacgttccggaatgccatttgtcagataatccatcacctgcgcatgtactcgccgttgaaacaccacacgatccggttcgaaatccccttccagattgtcgcaactgacgttaaacggatatcccgccgccacacagaacaaccagtcgagcgcctgcggcttcacttcaacatcttcaaactggctttgcgtttgggcatcgcgtccgtccgggcaataccagtagccgaaatcaaccagctcacggcgcgctttcccggcaatacaccagtggctaatctcatgaattgcgctggcataaaagccatgagcaaagacgattcggttatacggtacttccgcatcagcaggaagatagatcggttcgtcgtcgcctttaatcagacgggtattaaaatcatcggcaaagcagctattaaaaatttcaatcaactgctcgtagtggtgtgtactgttcattagttcatccccaaccagtggaggatctcctgtccgtggctgtcgtaaagtaatttggcactcatcaccgcgctgacgataacaatcatcgggcggatcagcttttgtcctttgctcaacaccagtcgactacccatgcgcgcgccgaggaactgccccaccagcatgacaaagcccgtcgcccaaatcactttgccgccgagaataaacagcagtaaaccgccgatgttactcgttgcgttgagtaatttggcgtgagccgtggctttggcgaggttaaatccgcacagcgtaacgaaggccagcgcgtaaaagctcccggcagccgggccaaagaatccatcataaaaaccgacgcagccaccggctattaacgcgaagggtaaaccgtacatccggcgctggcggtcttcttcacctagctttggcatcagcaagaaatagaggccgatacaaattaccagaatgggcaaaatctgccgtaagacatcagcctgaacgtattgcaccagcagtgcgccgctcatactgccgacaaaggtcatggcgatattgagtttctgatcgcttaaactaaccactttgcggcgaataaagtagatagtagcggaaatagagccgccgcaggcttgcagtttattggttgccagcgcattagcgggagacatccccgctgccatcaatgccggaatggtgagtaacccaccgccaccggcaatgctgtcgataaatcccgccagcatggcgacaaaaaagagaactcccagcaacagcggggaaaccataaacaggctattaaacgtttccattagatcacgtgctcatccagtagcgcctggcaggaaggcggcaacggaggcggtgtcttcttctcaggctttgttgttcccggttttggaggttcaaaccagctttgcagttctgccccgcaaccatcgccacttggcggtaaaggttgatcttcacactccagactatcggcagggcaacgtaatcgtacatgcatatgcgcgcgatgctggaaccagggtcgcactttgcgcaaccagtcgcgatcggtgcccgcatcaaggcaaagttgttgtttaatcgccggattaacaaaaatgcgcgtgacgtctttgtcctgggcggcgagtttgatcaagctgaaaatttctggcttccacagcgtggagacaacgtgtttaccgtcgcgggaaactaagtccagtgcttgcgggcgcaagagctgcgcggaggtccagcgagttttcggcagttgcagaaagatatcgacatccagtccggtctggtggctggcatgaccgccgttgaaacgcccaccagcgggcatccccatatcgccaatcagcaccgtacccatgcccagattgctcacctggctactcagacgctggataaacatcaccagatccgggtgaccgaaatagcgacgctgatcggtacgcatgacctgataatgttcggactgtatcggcagcgtgtcagcgccgacaatacagccattagaaaaactgcctatgctttgtgcgctacccggcacaggttgggttattttttgccacggcgtcgctgccaggctggcgctactggcaagcagagccagcagcgcaatcgcggttttattcattttttaccagcgtggaatatcagtcttcacatcggcattttgcgcccgttgccgtaacaggtgatccattaaaacgatcgccagcatcgcttctgcgatcggcactgcgcggatcccgacacagggatcgtgacggcctttggtgatcatctcaacttcttcgccaaagcggttaatggtacgacccggcacggtaatgctggaggtcggtttcagcgccatatgggcaatgatttgctgcccgctgctgataccgccgagaatgccgcccgcatggttgctctggaaaccgtctttggtgatttcatcgcggttctggctgccgcgcagcgccaccacgtcaaagccgtcgccaatttccacgcctttcaccgcgttgatgctcatcagcgcatgggcgatgtcagcatccaggcggtcaaagaccggctcgccaagtccggcaggaacgccactggcaacaacggtgactttagcgccgatggagtcgccctcttttttcagcgcacgcatcaactcgtctaacgcgtcgattttgtcggggtccgggcaaaaaaacggattttgctcgacctggctccagtctttgatatccagcggaatgtcgcccatctgggtcaggcagccacggatttcaataccaaatttctcggcgagatattttttggcaatagctcctgccgccacgcgcatggcggtttcgcgggcggaagaacgtccaccgccgcgataatcgcgcagaccgtatttttgttcgtaggtgtaatcggcatggcctggacggaaaacgtccttaatcgcactgtaatcctgagagcgctggtcagtgttttcgatcaacaagccaatgctggtgccggtagtaacgccttcaaaaacaccggagagaattttgacctgatccggctcgcggcgctgggtggtatagcggcttgtcccagggcgacgacggtcgaggtcatgttgcaggtccgcttccgtcagcggaatgcctggcggaacaccatcgacgatgcagccgagcgccagcccgtggctttcgccgaaggtggttacgcgaaagagttgtccaattgtgtttccagccatcacggctccgttattgttgtgtttgcgtgtttacttaatctttataaatcgcgaaatgttctcgtgcggcaataagctgctctttggtgagcataaacacaccatcgccgccgttatcaaactccagccaggtgaacggaacatccggatattgttccataagatgtaccatgctgttgccgacttcacaaatcaacacgccatcatcagcaaggtaatctgccgcgttaccgagaatgcgacgcgtcagtttcaggccgtcagtgccagatgccaggcccagttccggctcgtggcggtattcgtttggcaggtcggacatatcttccgcatcgacatacggcgggttagtgacaatcaggtcgtactgcactttcggcaagtcgcggaacagatcggaacgaatcggaatgacgttgtggatcagaccgtgttcttcgatgttctgttcagcaaccgccagcgcgtctggagagatatccaccgcgtcgacttctgcatccgggaaggcataagcacaggcaatggcgatgcagccgctaccagtacacatatctaaaatatgctgcggttgcttgctgataagtccggcaaatttattgttgatcagttcaccaatcgggctgcgcggcaccagcacgcgttcatcgacgtaaaattcatggccgcagaaccacgctttgttggtcaggtaagccaccggaatgcgttcattgacgcggcggatcacgcgttcaacaatacggtgtttttcgctggaggtcagacgcgcggtgcgcatatcttccggaatatccagcggcaggtagaggctaggcaacaccagctgtacggcttcatcccacgggttatcggtaccgtgaccgtaccagatatttgccgcgctgaagcggctcacgctccagcgcaacatgtcctgaatggtttgcagctcatttactgcttcatcaacgaaaattttatccacgtattcctccagggcatgatcgcaataatttcggcggctagtttgccatgaagatgacgataaatcagcattcacgcgcggtgagtgaggaaaaatacgtttaaaacgatcgattgcgctacgagtcgggtaaactgtaggaaaattagaaatagagacagataaatgaaaaagaaaacaacacttagcgaggaggaccaggctctgtttcgccagttgatggcggggactcgcaagattaagcaggacacgattgtccaccgaccgcagcgtaaaaaaatcagcgaagtgccggtgaaacgcttgatccaggagcaggctgatgccagccattatttctccgatgagtttcagccgttattaaataccgaaggtccggtgaaatatgttcgcccggatgtcagccattttgaggcgaagaaactgcgccgtggcgattatagcccggagttgtttttggatttacacggtctgacgcagctgcaggccaagcaggaactgggggcgttgattgccgcctgccgccgtgaacatgtgttttgcgcctgcgtgatgcatgggcacgggaagcatattttgaagcaacaaacaccgctgtggctggcacaacatccgcatgtgatggcctttcatcaggcaccaaaagagtatggcggtgatgcggcgttgttggtgttgattgaagtcgaagagtggctgccgccggagttgccctgaggagttgagcgcgttgcgccaggtacgggtaatggcaggggcgaatgcccctgcctggtgtatctaagggttacaactcattcagtatgtactggaaccggcaagtagaatcgattggctgcatactgctggtatcaacacgcacgaccatatcgtgtaactgtttgtccgttatagggtgtcgatttggcgtgacgctgacttccgccttgtcacatccgctcgcggtaaaagttatcatctgtgcaacccagcggcagtaaccacctgtttcattcatctgcgtactgtcgcacaacttcccatctttcatcaaatacgtactaagcgttttctcaaccacaccgcccgtgctctgcagggtgagcagtttactcttactgacataattctcattccaactaacgtcataaggttgaacagaaacggatggacaaatcgtgtcgtgactatcaggcccctgatacgtcacgccccctggagaggcttcagagtcattcataataaccaaccatggacaagaaaagtaagattcaatctctgcagagacaataacctcaaatgtataatacccgcagttccacccagacggtaatccaggacaacttgctttgttgatattttgatggtagccaatcagcttaacgctaggggcaggaggaggaccactccagctcacattttgcaatatttccccagtcatgagccattgactacttttatattcaccaacgtacactgcggatggcatcattatttttaaattaaaagtcgcaatattacggctatcaccgttgtaaccgtagtaaacgtcaacgctatgcccggcagccatagcttctgtagtagcaataagcatgaccagagcgaacaaccatcgtagtattttcattttaaatatactcaaatgtcgcagttaaagaggcggtaaattcaccgatcgtcacatcacggccgcttttcgcctgtagccaggctctgaaattgatatcgttattgccattggttagcgcaaaggtcgccccatttgtattgttgatggcaacctgcattccgtcggttttttccatgccaattcccactccctgagcggtactactcgtatccagtgccagaaaaccgggttgttcgctgtcttctacccccgtgagcgtgacttttacgttgtatcccgccggccctttgcaatctttcagcttaaagactacgggtacacgagcggactggcctgcaacgttcaaatcctgacgactgaccgtgggaaagcgcacctctgccagatattggccatccaccaccagcgcacaggatttacttaataaattaccggagaaatgcagattattatctgccgcgaataacgtgctactcattgccaatatcagccccgctaacaggacgtaaccaccggactgaatcatacttttattcattgataatccacccgtaatgttgcgtaagcgctaaaattcgtatcgcttaacacagcatcactcgcttttaccggtacggcctccagcttcggcttttgcgtaaaatcagtggcgttgatagcaagcggagtattgagtttaaaacgctgaccatcgtgctgaagctcgataccaaaaccgggtacatcagtttcaattgctgcatcattaaaactggtttgtgtaccagtccaggtgagggtcatctcccaatctggatgacgggtcgtgctgtcacaagtgagttcatatggcacctctttacgaccatagttgccgttgatgtcgtcgataatgagatcgcgaaattcgacttcaatggttttaccaccgctgatgctacaggttggcggactcaataatgtcccgtgaaaggtgatgtcttcatcagcagcatgagctatggcgctactgacacaaagcagggttaagaaagtctttctcattgatagtccaccaccatggtcaaactggcgttaaactcgcccgcagcaagttgcgccccgcttgccttcacaggtacagccttcaactgtggctggttattgatattaaatggcgtccagctattttcaccgacggcaaacaaactgttatcggcgctattttctatccgaatgcccagcccggtgatattggtactgagtaccgtttcgccgttaatcgtactggtattgcccttaagttgcatccgcaagtcgttagcaagactgtttgtgcagttcaacgtgtatttcgcatcttgccgataattggtgccatcaacgttatcagcaatcatattgccgaactctacctggctgcccttgatactacagggtggcggagcatcgaccaacacgcgcagaattaaatccacgggtttactaccagccatagcagataaactacagacactgcataccagcagccctgcgcccactacaaacttttgactcataactccccccgtcatcagcctttgcggctctgctcttcatccacctggcagctgttgccattgcactggaagaacagcggcatccgtgcgccaaagtcgttgacgtaagtcagcaccggtacgctatccattttcacattcagcggtaccgtggttttcggctcaatgaccagagggctgaaccctgcagctggattaccgtttttctgcgcactggcgttgctgataatcacgtagtacggcgttgggttattgacggtaaatgcctgaccgctgcgggtgagcgtcaccttgtgctgccacggacttttcatactgaccttttccagcgcctttggtcgccagaacaacttgatacgcgtttgcagcgcgatttgcagggtattgggtttgttactttttggcgggatctcgcgcacgttaaagtagaacatgctttcacgatcggctggcaatttgttgatatccggcattccctgcacttttacctgcccgttcatcatactatcgatgcgttgcactggcggcagcacagttaacgggctggtgatcttgttacccttttcatcttcaatccagctttgagccagataagggagtttcggatcgttattacgcagcgtcacgctgatacttttgtcgctttcattaaatatcaaacgggtacgatctggcgttacagacgccagggcagacaaactggtagcgctaagcagtaacgccagcgtcatagcacccaatttggcagagcaaagtaaatcagacatggatcattccttaatcacgttattggttagcactaacagaaacagggggatcggtgggtgtcacctgttgcgtctgctcctgaatgacaggctttatgtcatcaggaacaaccggcgcgacgttgcctttatgctggcatggcagtaacaagccgttaaacagatcggcaggcagcgggtccggcaggttgatatcgcaatgcgcaacaccactccagaacacactcatatgttcgccaggtttcaccccagccagatagacactaccgtcatcatcgacaaggcccactgtctgctcgttatcattttttacttctgcgccaaacggtggatggctgccatcttgtaaacgcagcaccgccatcgctttttgaccactgatgacggcaaatttgcggtagccaatggctccttcagttagcgtggcttgcaccacgctctgggttgcttcggcgttttccggcaatttgttgaggtcgatatacgcctgattgcgataataattgttaacgtcagaaacgacggctttaccaaacatattggtataaacagcagccccgttaccttccaccggaacatcggcaacgccatcggcatcaatcagcaggcgtgtcccgcccatattctgggtacggtgaagtgcgccgccgtgggtagtaagcgttgcgccgccctgtaagctcaagcccgcagaggtgtattgcccttcatggtagttcgcactgaggtcaacctgcgccaggctaccatcatggctgtagtagccatcaacgctggtgtgtttgtcactggtgccgatgttcaactgatagtgagtcgcgtcatcgacacggctaaaataaccgacctggctgctgtccgtcccactgccatagttgccgttatagctaacggtactgttgtcgccccacggcatactgagcgaaatttacatgcccttatccgcccggttgtcatactcgtagcggtagccagtcagggaaacgctcatattacgaatgctgcccatattgaaatagtgggagagcatgatgttgtagtttgtctgctcctcacgatcccagtaggtatggcgggtatagttgagataaacgctaacacccgcatcgcggaagttctggttataagtggcggtgtacatctctttgtcgttgcccgtacggaccatttcgctgtcactggcatccagatactcgctcatggtcataaagttctcttcgctgaagcgatatccagcgaaagtgacgcggctgttgagctggtcaaagtctttggaataactcacacggaaggagttaccgtccaggctacctttgccataagcggtgtctttatccagtttggtatggctatgagtaacatcaaacgcgaccgcgccgaaggtagacaaatcgcgaccgacgcccagcgccgcagactgatagttttcatcacccagcgcaccgccatataagctccagccgttagcgatgccccaggaggcttcagcaccagagaaaaatcccccctcgacatggtggccccactcttgcggacgtcccatcatgatcttatagcgaacctggcctgggcgagtgaggtatggcatgctggcggtgctgatgtcatattcctgcacctggccgttctgttcttcaatgcgaatatgcaacgtaccggagacggaatcaccaagatcctgaatacgaaacggtccagccggaacctgcgtttcgtaaatcacacgccccatctggctgacggtcacttttgctgtggtgtgtgccacgccggaaatgtctggcgcgtagccgcgcagattgggaggcaacatttgatcgtcagtgctgacactgccaccaacataattaaaaccgtcgaaaatatcggaattgaggtaatcttcgcccagcgccagtttggcttttaaactcggtaacgcccgccaggcataatagcgactccactcccattttttttgtgtgtcatcgccgccaaattcatcgtcatcatcattactgcgcgtatgttgatagttggtctgccagtcagcgcgcatacgccatggccccaggttaaccccgaccgtcccgttgccgctgatctcgttactgtcatcgccgccattttcttcgtgtcgtgtttgcgcagtgatgctgtagtccgcaatgatcccggagatgccatcatcccaacgagaaggtggatcccagtcgggccaggcatattcgaggtaagcctgcggtagactaatgactaatgcggactggcttaaatcagccttaatttccacgccttccagttgaccgggcttcaggcatttaccatcgtggctccattgcagatttttcgccacgtcttcttttaaaccaaactgcgccaccagttccggtgtcagacaagcatagcttttgctaacgtcatcttcaccagcataccagtaaatatcgtactcttccgccaatggctgtttatttagttgaacctgtaaattgtattttccgggctcaacatacccctggctggaaaaacgcttcagatcaatttttgtgtcgccttttaattccagaaaacgggaatcaaactgaatgtcgtcttcagcccagacactgctataactcccactcattgccagcgcaatgcaccacggaagaatccgtaatcgaaaaagagaatggtcaggcatacacgtttttatccgtttttattcttgttcggtcaaaatccatttaaataccccatagcagtgtcgctatgggggtatgccttacaggtaagtaatctggaaggtggtatttgcttcgaaattacccagatctggcgcatcagctgcgccgaccagccaggctttaaagttcagagtctgcttcgctttgcctttattagtggcagtatctttcacgattttctggtcaatacccatgccgcttttgtaagaggtacccagagagtcaccgatcgccaggctaacattgttaaatgccgcaccggtatcggtattgaaaatggtgtaataattgccgctatttgcagaagaaacggtaccagtaaaggtagtggtcattgtttcctgagtatcaaatacgcaatcttgcaggcgaatctggaaatttttcggcgtggtggtgccgttatttttcagtttttcggcaccgatatcacccatatcaacttccagtttgtgatcgtccggaacgatagaacacacactgtcttcaatggtgccgtaaaaacgtgcagtaccgttgttacccgcagcgattgttgccgtagaggtgaacgcgcccatcaccattgccgcagcaatagctgttttaacaaacttactcattatttgtccttaaactataaataattaaaatataaacattgcaatacattgattcagtcaatagccaatgtttatacccagccattgaatacggcatgcgatccaaaaaaacaggtcgtaaaaaatgtattcgttggtgtggggtcgaatagtgatgttttcactcccctgattcaatttaattttactaatgagtaaatgtagatttaattaatatattgataggggaaagattatcttaaggatcttctaaaaaaacacgaaatatatatttagaaaaaacaggaagcatatcaacaatgaatgccaatagcttaaaaaacaaacaatgaacatataatgcgattggcattaacccgcttttgtcgatataatatataaacactatagccagaatttaatcaagtttcaattacgtcctgcctgattattcaactctattttctccattatctgtattaataaatgataatgagtgtcaaacagacattattcatttcaacatgtaactttgggcaaaatcaagatacgcgcagaagaatactttccgaatgaaagttaaaggtgttttatttatagatggggagagtcttcgatagtagtgaggttgacagatatccgctgcctgatgagcaattatgcccaatgaatctacctcattgggcataatttggaactcatcagatagcttttgccatcttcagattacacgggctcatctgccagttgaatgtgccgtttccgctttcatcaagcgttacgctggcaatggcgctggtggtaaacataggcggcgtttcgcccggacataactcggcaaccagatacccgactaacggtaagtgagagatcaccagtacgctagcaacaccttcattggtcaacgcctgcaaataggcactgaccagaccaacatcgccgcagggcgttaactccggcagaacttctgcactggaaggcaggttcagacaatcccctacttcttccagtgtttgctcggctcgcaggaacgggctcaccagaacgcgttcgatttccactttttgacctttcagccagttcgccatcaggcgagattcgtcacaaccattagtggtcagaggacgaacggaatcactggcggcatcgagggctgcgtcgccgtgacgcatgataaaaacttgcatattgcaccgcttttgttaaccagattcgcccgttttctttcatctgaaaccagagaaagaaaacggtggccggcattgtgccttatccattcaccgaatgaaacgctgttttttacctcaatggcgtaagtatagtcaatatgcgtttacattttgaccaacactccgccattcagcgcggattcatatagctttgaccttcttattgcaggtcagttgcagttgttttccaaaaactttccccacgcgcgcccatctcgaccaaacgctcgcaaggggtaaaacgggaaccatactgcgtggcaagtcgttgcattattgcaaccacttcgcccgcgccgagagaatcgatatagcggaacggtccaccgagaaatggcggaaaaccaatgccaaataccgcgccaatatccccgtcacgcacgctacggataacctgctcatcaacacaacgtactgcttcattcagcatcaacatcacacaccgttcagcaacctgcggtgcggagattcgcccctgcccttgtgtgccaatcagcgggtaaatggcgggatcgacctgttttttgcttttacgccctttctgaccataaagatagaaaccccggccattttttctgcctttgcgatcgtcgttcaaaatactagaaacaacatttgcaggcgcgctaaaacgttctccataagcggcttccagtacaggaataattttagtcccggtgtcgattcctacctcatccaaaagttggattgggcctaccggaaaaccaaatttcactagcgcggcatcaatgtgctctacccgttcaccttgggtcaacatgcggatagcttcattaatgtaaggcgctaagatgcgattgacgtaaaaaccggctttgtcacgcacgacaattggcgttttaccctgttttttcgccagttttactgtggtagcgatggtttgcgcgcttgtccccgcatgaggaataatctccaccagcggcattttttccaccggactgaagaaatgcaggccgataacttgctcaggtcgcgtggcgtgagcggcgatatcaccaatcggtaaagaactcgtattgctagcaaagatggtatgagcggcgcaattttgctcaacttccgccaccatctgttgtttcaattcgagattttcaaacaccgcttcaataatcagatcgcgatgggcaaagccgcgatagtccgtcgttccggagattaatgccagctgtttgtcacgttcgctggctttgagatgacgacggcgaactttgccctccagctgatcccaactgtacttcagcgcatgatttatgccctgcgggttgatatctttaattctgaccggaatccccgctttacaagcagtgacataagcaataccgccgcccatcaagccaccacctaaaatccccacgctgtttaatggcgcaggcggcgcatcactgccgggatctttcttcacgtccgtactggcaaaaaagatactacgcagcgcctggctttgtggcgtcatcgccagttcgccaaacgcccgagcttcggcgtcataaccgctgctggtgccctgcgctaatcccgtttcaacaacctccaggatgcgttctgtcgccggataattgccttgagttttgtgttctgttttcttgccgaccattttgaacagcagcgcacgacctaacggccccgccagaatacgctcgcgtacaggtagagggcgggaagatgggcgctccttctttgccagctcaacagcggcttccagcagaatggagtgcggaacaacgtcatccaccagccccagctttaatgcctgtttcgcccgaagttgttttccggtgaggatcatctctaatgctgtgctgacgcctatcagacgcggtaaacgctgggtgccgccactaccgggtaacaatccaagttgtacttcaggcaaaccgagcaccgttttaggatcgtcagtacaaacgcgaccgtggcacgccagcgccaactccagcccaccacccaggcaagcgccatgaatagccgcgataacctgaatgggcaaagcatgaatctccgccatcaactgttggccctgccgcgccagagcttccgcttcttgcgccgttttgcagttgccgatcatgttgatgtctgcgccagcaatgaagttgtccggtttagcggagacaaacaccacgcctcgcaactctttgttttcacggagttgcttaataatggcgcgcacctggctggcaaactccgccttcagggtattcattttctcacccggtacgtcgatggtgataacggcaatgttgtccagacgaacattaagggtaaacgcacttgtcatttccattattccgcctccagaaccattgccgcgccaagcccaccggcagcacaggcggtaactaaaccaaatccaccgccgcgacggcgaagttcatgcaatgtctgggtaatcatccgcgcgccggtcgccgcgaagggatgcccgtaagcaatgctaccgccaagcacgttaaatttgctatcgtccacttcgccagtggcatgtgcacgccccagtgcttcacgagcaaaacgttcactacccagcaactgaatattcgccagcgtctgagctgcaaaggcttcgtgcatatcgatcaatgtcagatcgctcatcgtcaaaccggcacgctccagcgccagcggtgtactccaggctggaccgagcaacatgtcctgccagacatcaatcgcagtaaatgcgtagctgcgcagataccccagcggcaccagccctaattctttcgcccgggattcagtcatcaggatcaccgctgccgcgccatcggtcagcggcgtactgtttgccgccgttaccgttccgtgtttgcgatcaaacgccgggcgcagctttgcgtaatcggcaaggctggaattaccgcgaatattgttgtcttcgacaagcggttgtttataaggagggataaaggcagtcatcacctcttctttgagttttccgtcactccatgcctgagcggcacgctgatggctacggtgcgctaatgcatcttgctgttctcgggtgatgccgtaggttttcgccatttgctctgcggtgtcgcccatccgcaagccggtagaatattctgctaccgcaggtggtacgggcattaagtcgcgcaaacgcaggcgagagaagagtttcagtcgctggctcatggtacgagctttgttgacatcaaccagcacgcgcgccagttttttactgacgccaattggcaatacgctagaggaatctgccccaccggcaatccccgctcgaatagttcccgccatcaggctttctgcgacgtttgcaactgcctggaaactggtagcgcaagcgcggctgacgctgtaagcatcggtatgtacattcattcccgtaccgagaacaatttcacgcgcaatgttgggggcttcaggcatttgtacgacctgaccaaagaccagttgttcaatcacttcggcggggatctcgctgcgtgccagcagttcgcctaccaccatcttccctaaatcaaccgcgggaatgccatgaaaagccgtcgcctgacgggcaaaaggcgtacgtaaaccgctaacaatggcgatacgatcgccctggcgggtaaccagcggtaaaacctgacccataacactcccctgtaaaaaaataaataaagtggtctgacctgatcatagtcttaaccatttttttacatttagccaagtggagaaaagggaaagtgggagctatgacacagagagaaaagaagaagagaaaagaaaacgcccctgccagcaactgacaggggcgtacgtacccgagaggaattaacgcagacccagctggaaaatcagcatttcagcttcgcaggcaaaagtgaaatcgatatccaggcgcacaccgtcagactcttcagtgaaagtcggggtgattttgcaaggttcagattccacgctacgggctttttcagtcagcgccgccagcgtttgctctgcttctgcgcggtttgcaaacacgcggctgtaagacgcggtgcagtcggagttgtccataatggtgccaacatccatacagcagcaaaccggggtttcatcagcactacatttactcatcgttgatttcctctgtatgtgcacccaaggtgccagataaacgttgtggatattttacgcttccggaaagtgctgctccagttgttaattctgcaaaatcggataagtgaccgaaatcacacttaaaaatgatctaaaacaaaattcacccgaatccatgagtgcgccacctccaaattttgccagctggatcgcgtttcttagatcatatttgaaaaaagatagaaacatacttgcaacattccagctggtccgacctatactctcgccactggtctgatttctaagatgtacctcagaccctacacttcgcgctcctgttacagcacgtaacatagtttgtataaaaataaatcattgaggttatggtcatgagccagaaaaccctgtttacaaagtctgctctcgcagtcgcagtggcacttatctccacccaggcctggagcgcaggctttcagttaaacgaattttcttcctctggcctgggccgggcttatagtggggaaggcgcaattgccgatgatgcaggtaacgtcagccgtaaccccgcattgattactatgtttgaccgcccgacattttctgcgggtgcggtttatattgacccggatgtaaatatcagcggaacgtctccatctggtcgtagcctgaaagccgataacatcgcgcctacggcatgggttccgaacatgcactttgttgcaccgattaacgaccaatttggttggggcgcttctattacctctaactatggtctggctacagagtttaacgatacttatgcaggcggctctgtcgggggtacaaccgaccttgaaaccatgaacctgaacttaagcggtgcgtatcgcttaaataatgcatggagctttggtcttggtttcaacgccgtctacgctcgcgcgaaaattgaacgtttcgcaggcgatctggggcagttggttgctggccaaattatgcaatctcctgctggccaaactcagcaagggcaagcattggcagctaccgccaacggtattgacagtaataccaaaatcgctcatctgaacggtaaccagtggggctttggctggaacgccggaatcctgtatgaactggataaaaataaccgctatgcactgacctaccgttctgaagtgaaaattgacttcaaaggtaactacagcagcgatcttaatcgtgcgtttaataactacggtttgccaattcctaccgcgacaggtggcgcaacgcaaagcggttatctgacgctgaacctgcctgaaatgtgggaagtgagtggttataaccgtgttgatccacagtgggcgattcactatagcctggcttacaccagctggagtcagttccagcagctgaaagcgaccagtaccagtggcgacacgctgttccagaaacatgaaggctttaaagatgcttaccgcatcgcgttgggtaccacttattactacgatgataactggaccttccgtaccggtatcgcctttgatgacagcccagttcctgcacagaatcgttctatctccattccggaccaggaccgtttctggctgagtgcaggtacgacttacgcatttaataaagatgctagtgtcgacgttggtgtttcttatatgcacggtcagagcgtgaaaattaacgaaggcccataccagttcgagtctgaaggtaaagcctggctgttcggtactaactttaactacgcgttctgataacgcgttcgcctggataaagtcacctgcatagcaggtgactttaactcccccacttcaccgaaagtagtgtcctcattgcttacctcctgagttttgcaaacagcctgttggcagcttgccctttcaaatcaataagcggtatccacagacaaacctgaagggaaaggcatattttcaggcgttctgctcgtccttctcaaagagtttacttttctgcatttccaggatactcccccccccctggctattgtgcgctcatacactcaaattaaagataggttctaaataaatgagcgttttttgatagtctatttcattaggtaatatatatttgtaacaaatcaatcaaaatggaataaaatcatgctaccatctattagtatcaacaataccagcgcagcttacccagaatccatcaatgaaaataacaatgatgaagttaatggattagtacaagagttcaaaaacctttttaatggtaaggaaggaataagcacctgtattaaacatctacttgagcttataaaaaacgccatacgagtaaacgacgatccttatagatttaatattaataattccagtgttacttatattgatattgactccaatgatacagaccatattactattggtatcgacaaccaagaaccaatagaattacctgcgaactataaagacaaagaactcgtccgtactatcattaatgacaacatagttgagaagactcatgatatcaataacaaggaaatgatcttcagcgcattaaaagaaatatatgatggagatcctggttttatcttcgataagataagtcacaaactcagacatacggtaacggaatttgatgagagcgggaaaagcgaaccaacggacttatttacctggtacggtaaagataaaaaaggcgactctctcgctattgtaattaaaaataaaaacggaaatgattacttatctctcggttactacgatcaggacgactaccacattcaaagaggaattcgtattaatggtgatagtctcacccaatattgtagtgaaaacgccaggagtgctagtgcgtggtttgaaagcagtaaagctatcatggcagaaagttttgcaactggttccgatcatcaggttgtaaacgagctcaacggggaaagactgagagaaccaaacgacgtttttaaacgttatggtcgagcaataagatatgattttcaagtggacgatgcaaaatataaatgcgaccatctaaaagaaatagtttctactttagtcggtaacaaaattaacgttggccattctcaaaaaatatataagcattttaaggatctcgaaggtaaaattgaagaaaggcttcaaaatcgccaggctgaatatcaaaatgaaattaatcaaccatctgcgccaggtgttaattttgatgatatttaaaattatttttccagttttttgatttttcaacagctgaatatcggaaatagtcagtgacgaacatcagtatttttacataattacgtctaggtcattgtcggtttatctccttttacttgtggtaattgagggataacaacaaaaaaggtgagttttgcgactcaccttttttatttgtttcttattcagaatcaatatcttttaaatcatcctgaatcgcttgtgcgttcggattttcctgcggtttgagttcgccgccattagcgatgaaatcatgacgctggaagtacgcttcgcgcaccataatataaggatcggagctctgacgcagcagaccatcggaatccagcagctgagcgcgggtttcgatcccttcaagcgtccatttacccacagacatcggccaggtcagccaggaaagaaccgggtaaaaaccatccgccatatcaccaccgtcatcacgcagcgtgaagctaccgtagaacggtaactgaacgtaaggcccataacccacgccataatgaccaagcgtactaccgaagcggtgaggttcagtccgttgcagtttcgggttcgccatccctgcaacatcaataaaaccgcccatccccaaaatggtgttcaggaaaaagcgggtaaagtggaccatcccctgataagggtcgccctgcaagaagtagttaaccatcaccgcaggttcttcaaggttgccagtaaagttgctcaaaccgttacgcgccggttgcggaacataatcacgccaggcgacagcgaccggtcgaacaatatacgggtctaatacattgaagttgaagttgtacatggtgcggttgaacccttctaacgggtcagaacgcccttgctgatctgtaccggaactcgcacaccccaccagaagcgtagttcccagagcaagcgcgctcaggcgaagcttcataaatgtctccctgtttttttatggcttatgcagtttgccatccatgacggaacgataccgtatccgcctgtttaggtgtgggcgattgtaacagcacgtcaactgatgtccagacgccctgatttgctgatttgatcatagcctggtaatcgccgccctgtaggctacttgattctatagaaacagaaaaaggcaaacgcagccttttctacattttcagagtaactcccgtcagttgcgagcaaaaaagccgctacgctttagctatacgtgctaattcaagagaagagaccatggacaacgacaaaattgatcaacacagcgacgaaattgaagttgagagcgaagaaaaagagcgcggcaaaaaaatagaaatagatgaagaccgactcccctcccgggcgatggcaattcatgagcatatccgccaggatggtgaaaaagagctggaacgcgacgcaatggcgctactgtggagtgccattgcggcgggtctgagcatgggcgctagcttactggcaaaagggatatttcaagtcgaactggaaggtgtgccgggcagcttcttgctggagaatctcggttatacctttggttttattatcgtcattatggcccgccagcaattatttaccgaaaataccgtgactgcggtactacccgtcatgcaaaaaccgacaatgagcaacgtcggcttacttatacggttatggggcgtcgtgctgctgggtaatattctcgggacaggtattgcggcgtgggcatttgaatatatgcctatcttcaatgaagaaactcgcgatgcatttgtcaaaatcggcatggatgtgatgaagaacacccccagcgagatgtttgccaacgcgatcatttccggctggctgatcgccactatggtttggatgtttcctgcagcgggtgcggcaaagattgtggtgattatattgatgacctggcttattgccctgggtgacaccacccatatcgtggtcggttctgttgaaatcctctatctggtgtttaacggtacgctgcactggagcgatttcatctggcccttcgcactacctactttagcggggaacatctgcggcggcacctttatcttcgcgttaatgagtcatgcacagattcgtaacgacatgagcaataagcgtaaagcagaagcacgccaaaaagcagaacgtgcggaaaacattaagaaaaattataaaaacccggcataaatggcgagggtttaagcaatcgagcggcagcgtacttaccccgcactccattagcgggtatactcatgccgcattgtcctcttagttaaatggatataacgagcccctcctaagggctaattgcaggttcgattcctgcaggggacaccatttatcagttcgctcccatccgtaccagtccgcaaaatcccctgaatatcaagcattccgtagatttacagttcgtcatggttcgcttcagatcgttgacagccgcactccatgacgggtaaaaagtggataaaataattttacccaccggatttttaccctagagccatacagcctcacactcgatgaggcctgtcagtttcttaaaatatcctgatctaccatcgccgtcatagagcgtatttttattacctgatttgcaggttcgattccctattcggagatagcactcatgcaacacgaactacagcctgatagtctggttgatttgaaattcatcatggctgatactggctttggtaaaaccttcatctatgaccggattaagagtggcgacctgccaaaagccaaagttatccacgggcgagcaagatggttatatcgtgaccattgtgaattcaaaaataagctcttaagccgcgccaatgggtaaaatagcgggtaaaatatttctcacatctaaaaaacaccattccaatcaatcccctgctgcttcaagtagatgtctgcaggggacaccatccttgtgtttatccctaaaaccacataaaaaccgtaaattaaattcgaactagcaggccgaataaggcacaccaggaactcgtggttttattcattaactagtggtttttacctgttctcttagccagataataaacgcttcaatttttggccactgcctgcccggtaatgtggtgatgtaataatgctgatggcatttcaccgtcatatcgccaaacggcgcgacgagctcaccactggcaagccttttttgtaccaggcgttttcttcccatcgccaccccaatatgattcatcgcggcaataacagctaaatcagaacgatcaaagccaattccagaagatgtcggcaaattaaccgcataatgttgcgcccaactatgccattcatccgtaccggagtcgttgctccatgcctgtctgtcatggagcaacgtacagtgacacaggttaattaccgtgttggttaaagcatgtctttgagcgtattccgggctacatactggcaggatttcttcatccatcagaaagtgatgagtgagttgcgcactcggcgcatcatcaaagtagatcgccaaatcgattccggcacgttgcagattgacgttgtcattaccagtgagcacggtgaggctaatagacggataccggcgtgtaaagtcacctaatgcgggcaccaaccagcattgggcgatagagggccgggaatacagagttaacgttccgcttaactcctgatttttgatatcaagaatttcctggttcagggtatccaggctgctttttagcgcccaataaacacgtttcccctcgtgcgttaattccactttgcgatgggaacgaacaaacaactgaatgcccaattcttcttccagctgattgatacggtgacttaccgcactggggctcaggctcaattcctctgccgccagggcgaaggactgatgcctggcagccacttcaaaagtatgcattttacttaattgccagccgttaagcagccgatttcttatttcacgaaggggttccataatcacctcatttttcgcttaagtgtaaaaaaatagcggcaaaatttcagctatgagatgagctaaagtgaaccatatctcaattcaccttcatttttagatgtaaatcactccattgatgcaatttacctcatgtgaaaggcaaattttatcgtttgtcagcctgcgttgtttttttgtccaatatcatcaggttaatcacaggggaaggtgagatatgcactctcaaatctgggttgtgagcacgctgcttatcagcatcgtgttaattgtactgaccatcgtgaagttcaaattccacccgtttctggcgctgttgctggccagcttcttcgtgggaacgatgatgggcatggggccactggatatggtaaatgctattgaaagtggaattggcggaacgctggggttcctcgcagcggttatcggccttggcacgatactgggaaaaatgatggaagtatccggggccgcagaaagaattggtctgacacttcaacgctgccgctggcttagtgttgatgtcattatggtgctggttggcctgatttgtggcatcacgctgtttgttgaagtgggcgtcgtgctattgattcctctggcttttagtattgccaaaaaaaccaataccagtttattaaagcttgccattccgctatgtaccgcattgatggcagtgcactgcgtggttcctccacatccggctgctttatatgttgccaataagctgggcgcagatatcggtagcgtgatcgtctacggtttgctggttgggctgatggcaagtctgatcggtggcccacttttccttaaatttctgggtcaacgactgccctttaaacctgtacccacagagtttgcagatctcaaagttcgcgatgaaaaaacactaccgagtttaggcgcaacgttattcaccatactgctacccattgcgctgatgttggttaaaacgattgccgaattgaatatggcgcgtgagagtggtttgtatatcttggttgagtttattggcaaccctatcactgccatgtttatcgccgtgtttgtcgcctattatgtgttgggtatacgccagcatatgagcatggggacgatgctcacacatacggaaaatggcttcggttctattgctaatattttgctgattatcggggccggaggcgcattcaacgccattttaaaaagcagcagtctcgctgatacgctggcagttattctctccaatatgcatatgcacccgattcttctggcctggttagtggctcttattctgcatgcggcagtgggctccgctaccgtggcaatgatgggggcaacggcaattgttgcacccatgctgccgctgtatcccgacatcagcccggaaattattgcgattgctatcggtagtggtgcaattggctgcactatcgttacggacagccttttctggctagtgaagcaatattgcggcgctacgctcaatgaaacatttaaatactatacgacagcgacatttatcgctagtgtcgtcgctctggcgggcacattcctgctgagttttatcatctaagcgcaaagagacgtactatggaaaacgctaaaatgaacagcctcatcgcccagtatccgttggtaaaggatctggttgctcttaaagaaaccacctggtttaatcctggcacgaccagtttggctgaaggtttaccttatgttggcctgaccgaacaggatgttcaggacgcccatgcgcgcttatcccgttttgcaccctatctggcaaaagcatttcctgaaactgctgccactggggggattattgaaagtgaactggttgccattccagctatgcaaaaacggctggaaaaagaatatcagcaaccgatcagcgggcaactgttactgaaaaaagatagccatttgcccatttccggctccataaaagcacgcggcgggatttatgaagtcctggcacacgcagaaaaactggctctggaagcggggttgctgacgcttgatgatgactacagcaaactgctttctccggagtttaaacagttctttagccaatacagcattgctgtgggcagtaccggaaatctggggttaagtatcggcattatgagcgcccgcattggctttaaggtgacagttcatatgtctgctgatgcccgggcatggaaaaaagcgaaactgcgcagccatggcgttacggtcgtggaatatgagcaagattatggtgttgccgtcgaggaaggacgtaaagcagcgcagtctgacccgaactgtttctttattgatgacgaaaattcccgcacgttgttccttgggtattccgtcgctggccagcgtcttaaagcgcaatttgcccagcaaggccgtatcgtcgatgctgataaccctctgtttgtctatctgccgtgtggtgttggcggtggtcctggtggcgtcgcattcgggcttaaactggcgtttggcgatcatgttcactgcttttttgccgaaccaacgcactccccttgtatgttgttaggcgtccatacaggattacacgatcagatttctgttcaggatattggtatcgacaaccttaccgcagcggatggccttgcagttggtcgcgcaagtggctttgtcgggcgggcaatggagcgtctgctggatggcttctatacccttagcgatcaaaccatgtatgacatgcttggctggctggcgcaggaagaaggtattcgtcttgaacctagcgcactggcgggtatggccggacctcagcgcgtgtgtgcaagtgtaagttaccaacagatgcacggtttcagcgcagaacaactgcgtaataccactcatctggtgtgggcgacgggaggtggaatggtgccggaagaagagatgaatcaatatctggcaaaaggccgttaataacgtttcaacgcagcatcgcaatcctttccctgggtgagcgatgctgccgatggcgcagacttaagatccccggtcttacccgctataaccccctccttttatcatcacccaacgcctttcgctgtaaacggcggtttcgcaaaccaaaccaaaaccgtaagtaagataaaagcaatagccgccatacggaaaatctcatttgcagaaatagaaagactctgctgggttatttcattattaatttcattaagaactccactaaggctaccataatatttatccataatttgactgctactattaaacacggggttaaattgatcgatggttgctgtcaactgactatggtgtaagctttcgcgtcgtccccacagcgtcattgtcaagctcgtaccaacacttccactcaaggtacgaaaaaaattactcatactgctggcattggcaaatttattatctggcaagccactaaagctaatcgttgttaagggtaaaaagaaacaggcaacggcgaatccctgaaaaaactgcggcaaaatgatgcctgtaaaatcaatcgttggcataaatgtcacagaacgccagtaatagcaaaccgcatacatcaaaaaactaaatgtcactaacaaccgcatgtctattttgttgccataacgtcctatcaaaggactaattaatagtggcatgatgccgatgggcgcataagcaagtccggcccatatcgcattataccccatcgtttcctggagtaactgcggcataaggacgatcgctccagagtaaaataaatacgcgcatgtgatactcacaataccaatggtgaagttacgggacttaaacaaactgagatcaagaatcgggttctcactggtgctctcccaaatgactaaagagatcagagaaataacacttactactgttaatattattattgtactgctgttgaaccaatccagatcgcgccctttatcaagcataatttgcaagccaccaacaccgagcactaacagggtcagtcctggtagattcattttgaccggactagtctcagtttctcttcctttaagtaaggttaagcataatgtcaggacgataatccccatagggacattgattaaaaatatccaaccccagctaaagttatcacaaatataaccgcccaatatcggcccacatatcggagcgataatcacggtcatactccataatgccagagcaaatgttcttttttctggcggataattccttaataataaactctgactcagtggaattaacggccccgccattaacccctgaacgactctaaaaaatatcagcacatcaagattggtgcttaggctacacattaaactagacaggctaaaaaaagtgacactaagtaaaaataatcttaattcgcctattctttgtgccaacctgccagtaacagggatcgcaatggcatttgctacaccaaagctggtgataacccaggtgccttcgtctgtacttgctcccagaaagccagatattgtcggtattgcgacgttagaaatagtggaatccaacatttgcataaatgtcgctaaactcaatgcaatagtgacgcaccataacgtcccaccggttaatggtgccggagtacttttagtgattgccattaaagttgtccattatggctaataatgttgctaatttctttttctatcggactggtatcgataactaaagccttactggtataagccggcatggaggtcacggtactagccagctcaggcatctcggcaatgtcttcgttcttcgtatcaatagttgctgtcatgcttaaaccaatacgcaaggggtgttccatgagttcttttggatcaagagaaacttcaaccggtacacgctgaacgattttgatccagttccctgtcgcattttgtgcaggtaataaggagaacgcattgccggttcccatattgatccctgtcacccgaccatgaaacacaacattttcaccataaagatcgctgataatattgacgctttgaccaatccgtacatccgtgagttgtgtttctttaaagttggcattaacccacatttgacgtgccggtacgacagccattaagctttgtccggggctcactgtttcgccgacctgaacacttctctgggcaatatagccggtaaccggactcttaatatccgtacgtttaagcgccaaccaggcttctttagttgcatccgccgcttcaacgacttgtggctgacggtttaatggtgtgttcattactaaagctttattcgctttataagcctggatagcggcattcaatgccgctttgctacttattaacgtatctttggtatgctccagcgtttctttactaataaccccctgcttcgctaacggcactcgacggttataatcttctaaagattgttgatactgaatacgtgcactagcgacttcggcactgtattgtttatcctgtaagtatagtttattcgtttgccgaacaatatttgccagattatttttagctttattgagtgcgatagtggcatcagttttatccagactaactaaaatgtcaccttgtcgaacgtagttcgtatctttatgattaacgacagtgacactaccactgacttgtgcagaaattggatctgcattccccgtgacataggcgtcatctgtactaatcatgtcttctaattccatactccaataggcataggcaccactaaacgcaataaataaaactaccgccaataaagaaaagtattttcttctgttagaatgttttttattactattaatctgttccactattatctctcatttctcatagatgaaatttatgaattgaatgaaaagagcattcattcttcatatcaaacacagtgcatgtgttgcacattatcccaggaacgttggaggcctaatttaaatgaggtgcaaaaaaaacaacagaggactaaaccgtggcttttgcaatacaattcttacgcctgtaggattagtaagaagacttatagtgccaacttgaaactataaatcatcggtacaatccctgattttattgttgacatttcatttatgccgactatttatatggtatacttgtcgaattatcttaaaggaagctcagattttcttatttttattgagaaaatgagatgacgccttatgtctgtattactacagggagaagggagatgcttcattgcaaagggaataatctatgaacgcaataattattgatgaccatcctcttgctatcgcagcaattcgtaatttattgatcaaaaacgatattgaaatcttagcagagttgactgaaggcggaagtgccgttcagcgggtggaaacacttaagcctgatatcgtcatcattgatgtcgatatccccggagttaacggtatccaggtgttagaaacgctgaggaagcgccaatatagcggaattattattatcgtctccgctaaaaatgaccatttttacgggaaacattgtgctgatgctggcgctaatggtttcgtgagtaaaaaagaaggcatgaacaatatcattgcggctattgaagctgcaaaaaatggctactgctatttccccttctctctcaaccggtttgttggaagtttaacgtccgaccagcaaaaactcgactccttaagcaaacaagaaattagtgtcatgcggtatattcttgatggcaaggataataatgacattgctgaaaaaatgttcatcagcaacaaaactgtcagcacttataaaagtcgcctgatggaaaaattagaatgtaaaagtctgatggatctttacacattcgcacaacgtaacaaaatcggctaaccacatgaagtttttaccctatatttttcttctctgttgtggtctttggagcaccataagtttcgcagacgaagattacatcgaatatcgtggcatcagtagtaacaaccgtgtcacacttgatccactacgtctgagcaacaaggaattacgttggttagcgagcaaaaaaaatcttgtgattgcagtacataagtcccaaacggctacgttgttgcataccgatagccagcaacgggttcgtggtattaatgctgattatttaaatcttttaaaaagagcgttaaatatcaaattaacactccgggaatacgcagatcatcaaaaagcaatggacgcgcttgcagaaggtgaagtcgatatagtgttaagtcatttagttactagcccgcctcttaataatgacattgctgcaaccaaaccattgataattacctttccggcgctggtaaccacccttcacgacagtatgcgaccgcttaccagtccaaaaccagtaaatattgctcgggtagcaaattaccccccagacgaggtaattcatcaaagttttccaaaagcaacaattatctcttttacaaatttatatcaggcattagcatccgtcagtgctgggcacaatgattactttattggtagtaacatcattaccagcagtatgatttcccgctatttcactcactccttaaatgtagtgaaatattataacagcccgcgtcaatataattttttcttgaccagaaaagaatctgtcattcttaatgaagtactcaatagatttgttgatgctttaacaaatgaagttcgctatgaagtaagtcaaaattggcttgatacaggaaacctggcctttctgaacaaaccattagaactcactgaacatgaaaaacagtggattaagcagcatcccaatttaaaggtgctggaaaatccttacagccccccctattctatgacggatgaaaatggcagcgttcggggcgttatgggggacattcttaatattattaccttgcaaacaggtttaaatttttctccgatcaccgttagtcacaatatccatgctggaacacagcttagccccggaggatgggatataatacctggcgctatttatagtgaagatcgagaaaataatgttttatttgctgaagccttcataacaacgccttacgtttttgtcatgcaaaaagcgcctgacagtgaacaaacattaaaaaaaggaatgaaagttgccattccatattattatgagctgcatagccaattaaaagagatgtatccggaggttgaatggatacaggtcgataatgccagcgctgcatttcacaaggttaaggaaggtgaacttgatgctctggtcgcgacacagctaaatagccgttacatgatcgatcattactatcctaatgaactttatcattttcttattcctggcgttccgaatgcaagccttagcttcgcttttcctcgcggagaaccggaacttaaggatattattaataaagcactgaatgcaattcccccaagcgaagttctgcgcctgacggaaaaatggattaaaatgcccaatgtgaccattgacacatgggacctatatagcgagcaattttatattgttacgacattatccgttttattagttggcagtagccttttatggggattctacctgttacgcagtgttcgtcgtcgtaaagtcattcagggtgatttagaaaaccaaataagtttccgaaaagcactcagcgattccttaccgaatccaacttatgttgtaaactggcaaggtaatgtcattagtcataatagtgcttttgaacattatttcactgcggattactacaaaaatgcaatgttaccattagaaaacagtgacagtccctttaaagatgttttttctaatgcgcatgaagtcacagcagaaacgaaagaaaatcgaacaatatacacacaggtatttgaaattgataatggcatcgagaaaagatgcattaatcactggcatacattatgcaatcttcctgcaagtgacaatgcagtatatatttgtggttggcaagatattactgaaacgcgtgatctaattaatgcactcgaggtagaaaaaaataaagcgataaaggctaccgtagcaaaaagtcagtttctggcaacgatgagtcacgaaataagaacaccaataagctctattatgggcttcctggaacttctgagcggttctggtcttagcaaggagcaacgggtggaggcgattagtcttgcctacgccaccggacaaagtctcctcggcttaattggtgaaatccttgatgtcgacaaaattgaaagcggtaactatcaacttcaaccacaatgggtcgatatccctactttagtccagaacacttgtcactctttcggtgcgattgctgcaagcaaaagcatcgcattaagttgcagcagtacgtttcctgaacattacctggttaagatcgaccctcaggcgtttaagcaggtcttaagtaatttactgagtaatgctctcaaatttaccaccgagggggcagtaaaaattacgacctccctgggtcacattgatgacaaccacgctgttatcaaaatgacgattatggattctggaagtggattaagccaggaagaacaacaacaactgtttaaacgctacagccaaacaagtgcaggtcgtcagcaaacaggttctggtttaggcttaatgatctgcaaagaattaattaaaaatatgcagggcgatttgagtttagaaagtcatccaggcataggaacaacatttacgatcacaatcccggtagaaattagccagcaagtggcgactgtcgaggcaaaagcagaacaacccatcacactacctgaaaagttgagcatattaatcgcggatgatcatccgaccaacaggctattactcaaacgccagctaaatctattaggatatgatgttgatgaagccactgatggtgtgcaagcgctacacaaagtcagtatgcaacattatgatctgcttattactgacgttaatatgccgaatatggatggttttgagttgactcgcaaactccgtgagcaaaattcttccttacccatctgggggcttacagccaacgcacaggctaacgaacgtgaaaaagggttaagttgcggcatgaacttatgtttgttcaaaccgttgaccctggatgtactgaaaacacatttaagtcagttacaccaagttgcgcatattgcacctcagtatcgccaccttgatatcgaagccctgaaaaataatacggcgaacgatctacaactgatgcaggagattctcatgactttccagcatgaaacgcataaagatctacccgctgcgtttcaagcactagaagctggcgataacagaactttccatcagtgtattcatcgcatccacggtgcggctaacatcctgaatttgcaaaagttgattaatattagccatcagttagaaataacacctgttagtgatgacagtaagcctgaaattcttcagttgctgaactctgtaaaagaacacattgcagagctggaccaggagattgctgttttctgtcagaaaaatgactaaatagcggctcccacaatgttcaaatgtgggagctatttaccagcacatcttacatttaactactgaactcctggcgaatttgttccccatgctggtcgagcgttgccgctcccggcataacatgcgggtccgcgcagccgctgatttttatcggattacccggcatcattattcccccggcttcaatcaacatatttctcgcctgagtttgtggcaatttaatggcctcagccacacttaataacggcgcgacgggtacaccaacttcatgtattctggctaaccaaacttcagctgcctgcgtttttaacgtccgctcaatatattgtttaagaatagcctggttttgtacgcgtaaaatattgctgctaaatcggggatcattaaccagttccgtaagctccagtgcctggcataacgcagaaaaaagcttgtcattaccacaacaaatcgtaatcggcttatcctgagtattgaaaacatcaaaaggtgccatgtagggatggcgatttcccagacgttgtggactcttcccagttgcgatatatgccatcagaccatgctccagaaaactcagcgtggcatcaaacatcgctatatcgacatgcgcccctctctggctcttttcgcggccataaagtgcactcactattccgctgaataaatagacaccgccgcatagatccgcaagagatgtaccaacgcgcactggcggagcatcaggatatcctgtttccatcattatcccgctcattgcctgaatgatggtatcgtaggcaggagcatcttttagcggaccggtatgtccgaaaccactgctactagcatatatgaggcgcgggttgatttcttgaagcgtttcccaactaaaccccagtttttccattgtacctgggcgaaaattctcagctaatacatcagcttgtttgagcatatttataaatatacttttatcgtgatcattctttaaatcaagaaccacactctctttgccatgattaataaaactgtaatagagactctgtccatccacatagggaccaaatgtgcgggtatcatcaccatgacccggcggctcaactttaattacccttgcgcccatattacaaagaagttgagttccgaaaggtccattaaggacatgtgtcatatcgataactaataagccttcaaacggccctttgctttcattatttgtcatttgcttatgccttgaaaaaagccgaaggtgaaaagacacttcggcatttatgtaaaatcaataacatgattaattaactaaccagtcgactgacataaatccacaagggagccgtgacgacaaagcccagtacgctcacagccaaactcgctgtaccagtacgggtgtagacattaaaccggctggcaataatgattccggagaatgccggcggtaatgcgcctgccagtaccatcatctgcagatgttcgctgttcaaatgacatgccataccaacgagaagcagtgccagtggcatcagaatcagcttcaggaaggtgttataagcaatttcggcactgaactcgaatttatgtgcagccagagtcaaccccgcagcgaataccgctaccccactgttagccttcgcaatcagattaaaggttgggtcccatgctgccggaatttttaccccaaccaacaccaggatcgttgccagaacaggtgcccatactactggctcctttgccgcagaaattaatgcgctcagattactattcttcttaccatccgctccactagaaggattcagcaaatacagaccaataggaatagtaattgcgttaacaataatagaaataattgctaccactaaacctgtacttacggaatcaccataaataggatcgagaactgcaaaccccaggaatccaatggtaggactacctgcaattaatgcacatacagctgcttctgcatgggtacgtttaaaaaatttgtagcaaccgaaccaggagaaaaagaaacatccgacaataaccacaagacttacaagggtcagacgagtgtccgcaaaaatcatttccctgtttgcccgagtaatagatacaaatagagccgcaggaagcgcgtagtttaataccagtttattaaatgcccgagcttgatcttcactaaatgtttctcgtctgccgctaaaataacccaacagcatgattacgataataggcaataaatcgccaataaaaaatgttagcataatagtatttccgataagggtcccctcaccatcgcataatgagttggcaagaggagacgatgtcagtatttaattaccagcgacttgttttgggttaagtttggtaatatggccactttcagttcctgctgcagggtcgatgaccacattaataatggtcggtttgcggctctgaataccggtggttaaagcatgacgaagttcatctgtcgtggtgacgttatagccaacgccacgaaacgcatccattaatttgtcataccttgcatggtgcaacagatccgttggacttggtgcaccagcgccactgagatcaacaccgtctcctctgtagatgccgccattattaaaaataacgatcgtcaccggcaggttatatcgacaaatcgtttcaatttccatcccactgaaaccaaaagcactatcaccttcaatggcgacaaccggagaaccagaagtcacgctagcaccgatggcatagcccataccgatgcccatgacaccccaggtaccacaatccagacgacgacgtggtttatacatatcaataatatttcgtgcattatccagggtatttgcaccttcattaactaaataaatatcctggttctcgcgcaatacgtcgcgcacagcacttaatgcattaaagtaatttaatggttgagtatctgtacttaatttttcatgcattttttgtgcattttgctgcttgtggatatttaaaatatcgcgccataccagtggagtcgtaaatgtgttttgtttcagttctgccagcataccttgcatactggatgcaatatcaccaacgactggcacagcaatggggcggttgctgtcaatttcctgcggttcaatatccagttgaataaactgtgtatctgccgcccatccttttttaccgtgtgccaataaccaattcagtcgtgcaccaacaagcatgacaacgtcagcatttgccagggcaaagctacgcgcagctgccgcagaaagtggatgcgtatcttcaaggatccctttcgccatagacattggcaggaatggaatctgagcactttcaataaattcacgaagctgttcatcagcttgactatacgccgcgcctttgccaaggataattaatggccgttcagcttttgctaaaaggctaattgcgctagtgacactcttcgggcatggcaataatgctgggctcggattttcaactttaacaatcgtggttaacgcttcgtctttttccatcgtcgcggccaggacatttgctggcaaatcaagataaactccgccagggcgaccgcttacagagacccggatagcgcgtgccaatgcaatgccaagatcctgcggctgattaacgcgaaatgctgctttggcatacggttttgccgcattcatttggtccagctcttcataatcaccttgctgtaggtcgacgatcgcgcggtcgctggagccgctaatcatgatcatcggaaaaccatttaccgttgcgttggccaatgcggtcaaaccattgaggaatcctggcgcagaaactgtcaggcagatccccggtttttgggtaagaaaaccgcttgccgcagcggcatagcctgcgctctgctcatgacgaaaaccaatataacgaatgccttccgcctgggcatggcgtgccatatccgtcacaggaatacctacaacaccataaatagtgtcaatattattctgttttaatgcttcaacgatgatatgcataccatctgtcatttgaagttgatcactcatgattaataacctcgaaatttttataaattgggagccagaagcccccgttaatatcagatggcgtggttttgcttcattgcagcaatttcatcgtcgctataacccagctcctgcaatacagcagcggtatgttcacctaatagcggcgcagctttaatatccggcgtaaaggcagagaatttcattggacaaccaacggtcagatattttccacgcaacggttgttccacttcaacaacactgccactttggcgcaaagagggatcaagactaatttctttcatacttaaaaccggtgcacaaggaatatcaaactgagtcaaataggccaccgcttcatgtttatcaatagtgacagtgtatttttcgatttcagcaaaaatatcgaaaatatgtggctgtcgtgcatgggctgtactgtatgccggatcggtaatccattctggtttgccgatggctttacaggtgttttcccagttttgctcctgaatagtgaaataaatataggcgttaggatcggtttcccagcctttacatttcaggatccagccaggctgaccgccaccacctgcattaccaccgcggggaactgcatcaccaaatgtaccattcggatactgcgggtattcttccagatgacccaatttatcgagacgctgctggtcacgtaatttcacgcggcaaaggttcaatacggcatcctgcatactcatggtgactcgttgcccacgccccgttttttcgcgatgcagcaaagcagcaagtaaaccgatcagcaaatgcattccggtgttgctgtcacccaacgctgcagcgcttaccagcggcggaccatcccaaaaacccgtagtggatgccgcgccacccgctgcctgagcaacgttttcataggcttttacattcacataagggctacactcatcaaaccctttgatgctaccaaaaatcagacgtggattgatttcttgaatatgctcccaggtgaagcccatgtgatcaatggcccctggatgaaagttctcgactaagatatcagcttcgcggatcagcttttccattacctctttgccttccgctgttttggtatttaactcaatagaacgtttgttactgttaagcatggtgaagtaaagcgcatcgatatcaggaatatctcgcagctggtgacgcgttacgtcaccaacgccgggacgttcaattttaataacgtcagcgccaaaccaggccagcatttgagtacaagatgggccagattgcacaccggtgaaatcgagaactttaattccttgaagtggagtactcatagcaatacctattagttaattaaatatgtgttaatttagcgtttatttaaggcgtaatatcttctataaataacccgcaaaatatcgtcgtagctgcactcgatatttttaaaatcctgtatcaagtgctgaaaatcatttcatcgccacttccaattcctttctgcatggtaagtagtgaggacgaaaagaagaatatgataaatattgattcgtggtaatcagagagagtcgcgacatttgtgatgttattcttacaactgtaagaagcgccggtgatttacaagcaagggtatgattacgctttttaaagcgtaccataaaacataacataataaatgatttgtgatgacacgggattattgcggtttactttgaggaatataaaatgcgagtttatagcaccgcgagcgccaaataattttatgaccacaacctgtcgtattgtggtcataaaaaattgtcggctggagggagttaaatcctttacctcaatatactgcctgtcagcattagttcacaaacagtgcttcgctatcgacgatgattccatcttccgcacctttaagcgccaggtttgcctcgtagtattgctttttatcaagcagtttctgcgcatcagcaagtgcattacgagtctgtttaagtggcatcagatattggttttccattacgccaacaccggccaggcgaagctcttccattgcgccctttttatcccctttcgccattttttcattggcaatttttatcgcggcttctttttcgggagttgctacataactctcagaaattccgacagatgcattaatgacaatatattggtcatcattgagattggtctttttacctggcttagcgaactttgcccattcggtactgtcatcactcagcaaagcggaagcttcattggtcagttcttttgccttttctggatcgccatgaaacagagccaggcgcgctacctgcacgtcacgcatcgcatataaaccttgttcagagatacgctctgctgccgctgccgttttctgggtttgctgaacttgctgagtttgctgttgtgccgctaccggagcattatcagcagcccatacagtactagatgccagaattgctgtgaccatcgtggccataattaaacgtttcatacttacctcattctttaacagttttagaaaacgccgccatcatattgggtgagcatgaaatgagaaatcagagagcaacggtcattttgaaagggttatcttacagttgtagttattatcgcaagaagtattttagtcttacaattgtaggaatatgcttcctgtcgcagagaactattcttatataccacaaagagatgtcatttattatatcgatgtaaatactgattaattaaatgtaaatacagccataacatcgtaggttctcagtgaaccattttcaggataactttctatgaaagtaaacttaatacttttcagcttatttttattggtctctattatggcatgcaatgtttttgcattttccattagcggtggtggaagtgagaggagctataaagagactgaaaaaacaagtgcgatgacgaccacacactctacaaaacttcagccaagtcaggcgattttgtttaagatgagagaagatgcgccaccattaaacctcacagaagaaatgccgcccccttttccgacaaaggcgaattatcttattcatcctgtgcgataacgtctttcacatggcaggtgaacaatcatgtctgatgctgatgtgaacacctgcccaaatgagccatcctgacccattaccgcctgccataccccaccataaagcgaatcatcaagccacaagccggggcaagaaacataaatatccccgtcactagttcattaccgccagttaaccacatggtgaagtaataaatgagtgcagcgaggatcaccatgccgaagaaagaagagaccgcgcttaccacgttcagtacctgaccgatgtagccgcttacgcagacaatacacagggcgagaaacatccataaattaatcatagctcaacctcctgccgcgctaaaaaacctgtaacttcagtcactttaatagtaagacaatccttaacctctggcaatttttgctaagcatcaatgaaaacagcatgttaaatgcaagactgttgtgtacggaaaaatatttactttgcacgattaataatcagtagctgaaagcagtcagcgagtgataaagtacagataccgcattcatgctcctcgtggttatgtcctgactagtctttacactctttacaggaaccattgtcgtacatgatggcccaaccaattgagtgtaccgctgtcgacatggaatcttctgcgatacaacaattcgtatctacagaaggtaactatgtttccacaatgcaaattttcccgcgagtttctacatcctcgctactggctcacatggtttgggcttggtgtactctggctttgggtacagcttccttatcctgttctctgctttctcggcacgcgtattggcgcaatggcgcgaccattcctgaaacgtcgtgaatctatcgcccgtaaaaacctggaactttgtttcccgcagcattctgcggaagaacgcgagaagatgattgccgaaaactttcgtagtctcggcatggcgctggtagaaaccggcatggcatggttctggcccgacagtcgcgtacgtaaatggtttgatgttgaagggttggataaccttaaacgcgcacaaatgcaaaatcgcggcgtaatggttgtcggcgtccattttatgagcctggaactgggcggccgcgtgatgggactgtgccaaccaatgatggctacctatcgtccacataataatcagctgatggaatgggtgcagacccgtgggcgcatgcgctctaacaaagcgatgatcggcagaaataatctgcgcggcattgtcggtgcactgaagaaaggtgaagcggtatggtttgctcccgatcaggattatggtcgtaaaggcagctccttcgcgccgttctttgcggtggaaaatgtcgccacaaccaatggcacctatgttctctcccgtctctctggcgcagccatgttgaccgtaacgatggtaagaaaagcggattacagcggatatcgtttgttcatcaccccagagatggaaggctacccgacagatgaaaatcaagccgctgcctatatgaacaagattatcgagaaagagatcatgcgcgcaccggagcagtacctctggatccaccgtcgctttaaaacgcgcccggtgggagaaagcagcttgtacatttaacaaactgctcttactctttccctcctcaaatcggccataataacctcatggtttttatggcttttttcttaaggttttttccttcgctgaatatctaattattaccgtcagaaattaaactgtcgccgatatgagacacttgtaagttactaaaagtaaataagaaaatgcctcttgtctcgtttcagttttaggcgtacattagcgccgtctcgagcagtttagctcagaattctggggtgatgcccacggtaaaatacagggcttttaaggtcgctttgcccggtgtcaactcactgtatcaggtgtaatgaagtcattcaggcgtaacagtaattacgcggagagatgtaaagtgaaatatttctttatgggcatttcttttatggtcatcgtttgggccggtacttttgccctgatgatctaaaagcaaactgtgcaatgaaaaacaggagccatcaggctcctgtttgcatttctgacgacggtgtttattccgcgttttcgtgaatatgtttgctgctggcgggtagtaaaccgtcggcacggaacatcgctttaatccctctgatggcctgacgaatacggtcgcggttttcaatcagtgcaaagcgaacatgcgtatcaccatagtcgccaaagccaatccccgggctgacacaaaccttcgcttcgttaaggagcttcttggcaaattccaggcttcccatggccgcatatggttccgggattttcgcccagacatacatgctagccttcggcatttcaaccatccagcccgcttcatgcagccctttaaccaatacatcacggcggcgtttgtactgttcggcaatgtcgcgcacgcactgttgatcgccctccagcgccgcaatcgccgccacctgcaacggcgtaaaggtgccgtaatcgtgatagcttttaatacgagccagggcgctgaccagcgttttgttgccaaccataaagccgatacgccagcccgccatgttgtagcttttgctcagcgtaaagaactcgactgccacatcgcgtgcacccggtacctgcataatactcggcgctttccagccatcgtagacgatatcggcataggccaggtcatggaccaccagcacatcgtagcgtttcgccagcgccactactttttcgaagaactccagttccacgcattgcgcggttgggttactcgggaagccgaggatcatcatcttcggtttcggataactttcacgaatggctcgctccagttcgttgaagaaatcgacaccttccaccagcggcacactgcgtacctgcgccccggcaatcaccgcgccataaatatggatcgggtaacttggattcggcaccagcaccgtgtcaccatgatccagcgtcgccagcatcagatgcgccaggccctctttgctaccaatagtgacgatggcttcactttccgggtcgatttcaacgtcgtagcgatcctgataccagcgggaaatggcgcgacgtaaccgcggaatgccgcgactagtggagtaaccatgcgtgtccgggcgctgggccacagtacataatttttcgacgatatgcggcggagtcgcaccgtccgggttacccatgctgaaatcgataatatcttcgccgcgccgacgcgcagccattttcagttcagcggtgatgttaaaaacgtagggcgggagacgatcaatgcgcgtaaagcgacgttcagggcgagtgtcagccataatttcctcagattaacgttagcgcccggaccgtccgagcgacgctgccacgatggtggctgttttgaaaatagcctgattaatttctgtctgtccagtgttttagaacattttatcaatgacgttaaatgaggaactctgctttaaaaacaggaaatttatctgcgctaacaagaaaattaccactcattctattaacataataatttcaataaatttactaaccagaagtgcattatcaagagatgcattgctaatacaccatttatctatcaatccccttttaaaattgtggtttttcctcaaaaacggcctgctggtcatcagccttcaggttacctatcatagaggtttaatccttattcagagtcacccgtgcacgaaatattcaacatgctgctggcggtcttcgatcgggcagcgttaatgcttatctgcctgttctttctcatccgtatccgcctgtttcgcgaactgttgcacaagagcgcgcactccccaaaagaattgctcgccgttaccgccattttcagcctgttcgccctgttcagcacctggtccggcgttcccgtagaaggcagcctggtgaacgtacgtattatcgcggtgatgtccggcgggattctgtttggcccgtgggtaggcatcattaccggcgtgattgcgggtattcaccggtatttaattgatatcggcggcgtgacggcgatcccctgctttatcaccagcattctggcgggttgtataagcggctggatcaacctgaaaatccccaaagcacagcgctggcgcgtcggtattctcggcggcatgttgtgtgagacgttgaccatgattctggtaattgtctgggcaccaactaccgcgttggggatcgatatcgtctctaaaatcggcattccaatgatcctcggtagcgtctgtatcggctttattgtgcttctggtgcaaagcgttgagggcgaaaaagaggccagcgccgcgcggcaggccaagctggcgctggatatcgccaacaaaacgctaccgctgtttcgccatgtcaatagcgagagtttacgcaaggtctgcgaaattatccgcgatgacattcacgccgatgcggtggcgattactaataccgatcatgtgctggcctatgttggcgtgggtgaacataactatcagaatggcgatgacttcattagcccgactacccgtcaggcgatgaattacggaaaaatcatcattaaaaacaatgatgaagcccaccgcacaccagagattcattccatgctggtgatcccattgtgggagaaaggggtcgtgaccggaacgctgaaaatttactactgccacgcgcatcagatcaccagcagtttacaggaaatggcggtcggtctgagccaaatcatctccacgcaactggaggttagtcgcgccgagcagctacgtgaaatggcaaataaggcagagcttcgcgccctgcaaagcaaaattaatccccattttctgtttaacgctctgaacgctattagtagcagtatccgtctgaatccggataccgctcgccagttgatctttaatctgagccgttatctgcgctataacattgaattaaaagacgatgagcaaatcgatatcaaaaaagagctgtatcaaattaaagactatattgccattgagcaggcccgctttggtgacaagctgacggttatctatgatattgatgaagaggtgaattgctgcattcccagcctgctgatccagccgttggtggagaacgccattgtccacggtattcagccttgcaaaggtaaaggcgttgtcaccatcagcgttgcagagtgcggaaatcgggtacgcattgcggtgcgagataccgggcacggcatcgatccaaaggtgattgagcgggtcgaagcgaatgaaatgccgggcaataaaattggcctgctgaatgtccatcatcgcgtgaagttattgtatggcgaggggctgcatatccgccgcctggagccggggacggaaattgcgttttacattcctaaccaacgcaccccagtcgccagtcaggctacgttattgctttgagccggagtgatattgtgaaagtcatcattgttgaagacgaattcctggcacaacaggaactgagctggctaattaaagagcacagccagatggagattgtcggcacctttgacgacggtctggacgtgttgaagtttttgcagcataaccgcgtcgacgccatttttctggatatcaatattccgagcctggatggcgtgttgctggcgcaaaacatcagccagttcgcccataaaccgtttattgtgttcatcaccgcgtggaaagaacatgcggtagaagcgtttgaactggaggcgtttgactacattctcaaaccgtatcaggagagtcgtattaccgggatgctgcaaaaactggaagcggcctggcaacaacagcagaccagcagtacgcctgccgcgacggtaacgcgtgagaatgacaccattaatctggtgaaagatgagcgaataatcgtcacgccaattaacgatatctattacgccgaagcgcacgagaaaatgacctttgtctatacgcggcgtgaatcctacgtaatgccgatgaacattaccgaattttgcagcaaactgccgccgagccattttttccgctgccatcgcagtttttgtgtcaatctgaacaaaatacgcgaaatcgaaccgtggtttaataacacctacattctgcgactgaaagatctggattttgaagtgccggtcagccgcagcaaagtgaaagaatttcgccagttaatgcatctttaatcgggaactttcatgaaagcaccaggcttgcccgccgatcaacaatttttcgccgatctgttcagcggcctggtgcttaacccgcaactactggggcgcgtctggtttgccagccagcctgccagcttgccggtgggcagtttatgtattgattttccccgtctggatatcgtgctgcgcggcgaatacggcaatctgctggaagcaaagcagcaacgtttggtggaaggagaaatgctgtttattccggcgcgcgcggctaatttaccggtcaacaacaaaccggtgatgctgttaagcctggtgttcgctccgacctggcttgggttaagcttttacgatagccgcaccacgagcttgttgcatcctgctcgccagatccagcttcccagcctgcaacgcggtgaaggtgaagcgatgcttaccgccctcacccatcttagccgtagcccgctggagcaaaatatcattcagccgctggtgttaagtttgctgcatctttgccgtagcgtggtgaatatgccgccgggcaatagccagccgcgcggcgattttctctatcacagcatttgtaactgggttcaggataattatgcccagccgctcacccgcgagagcgtggcgcagttttttaatatcacgcccaatcatctgagtaaactgtttgctcagcatggaacgatgcgttttatcgagtatgtgcgttgggtgcgaatggcgaaggcgaggatgattttgcagaaatatcatctgagtattcatgaagtggcacagcgttgcggttttccggatagcgactatttttgtcgcgttttccggcgtcagtttggtctgacgccgggagagtacagcgcccgttttcagggctaacgtcagaaggttaattctgtttccagcagcgtcaggatactttgtgcatcttgcgcggcaaacaagctctggcggaagtttttattcaccagtttacgcgccagctggctgaagactttcacatgattcatcccttcgttagcacccagcgtcagcatgatcaccagttcgacttcgcccatttcactctgccagccaatcggtttcgccagccgggcaatgctgatactggaatgacggatccactgagatttggtgtgcgggatcgctacgccaaaaccaacgccggtggtaacaatctcttcccgctgccagacatcttcttccagctcaaacggatgttcagtgcgcccgttaacgccgaggttgccgcacaggaactggatcgcctgctctttattgctaaaatcctgatcaacaaagatattctccagcgccagcagtgggcgaacgtcttcttccggcgtaaaggcggtgagtaacgcttcaatttcctgcgcactgcggcattcacatgcctgacgcgccagttcccgacacgcctcgctatccagttgacgaagctggcttttcaccgccggaatacgcgggctactcatactcagctcatccaggcccagcccaagcagtagcggcagataacggctttcaccgcccagttcaccgcaaatgcctacccatttgccccgctgatgcgcagtggtaactatttgctgcaacatgcgcaggaagcttggcgtaatcgggttatatagcgggcttacgcgcgggttattacgatcgaccgcatacagatactgggtcatatcgttggagccgatactgaagaaatcgacctcatcgcagaagtggtcgatgatgtagcacacgctcggaacttccaccatgatcccaagcgtaatcgtctctgcatgacgcaggccatcgcgcttaagctcaacgatcgctttttggatctcgcctttcacccataagatctgatcgaggctgtgaaccatcgggatcatcaactgggcgttgccgaaactggcggcgcgcaaaatggcccgcagttgagtgcggaacaggccagcaaattccgggtaaatacgtaccgcgcgatagccgaggaacgggttctcttcctggggaatattcagataaggaatgcttttatcgccgccgatgtccatcgtgcggaagataatcggcttgtcgcccgccgccagtagcacctgctggtaggcttcaaattgctcctgctcgtccggcgcgctgtcgcgatccatatagagcatttcggtacggaacagcccgacaccttccgcgccgttggcaaacgcgcctggcgcttccagagcggtgccgatattcgccgcaatatcaatacgcttgttatcacgggaataggccagctgcgcggcagcctgcgcctgttgtttttggcgtttatccgccagcgtctgcgcgacctgataataaccgctcaccgcgtcattcgggttaatcgccagcacgccgcactgggcgtcaagcactgcaggttgcccggcataacgggcaatcgcatccagcggcaagccactcagtaccgggatcgcgctggcacgggccagaatcagtgtatggctggtgcgcccggttttctccagaatcatgcccgcaagatttttcaaatcaaggctcaaaaactggcttggggttaaatcttcagccaccagaatggtcggtttttcaagcaccagcttgttgcgcggcttcagttccggccaggtgatatgcagcaactgttcgctgatatcgcgaatgtcgctaacacgttcgcgcagataatcgctggcagaggcagaaagtttggcgcaaacctgctccatattgctgatgatcgccgcccccagcccctgatgctgttctgtcatcaggcgacggatattgcctgcaaattcatcatcctgaatcaggctcaaatgggcgctgaggatagttttgctttcgccgtcacgctcacgcaattgctggttcagttgctcggcaagcgttgccaggctgtgctccagccgggtggaatcttgcgcactggcggggattgcccgataactgtcgaggctgtcgctttgtaacagggtcagcgtacccacgccgacgccgcttgccagcacattgccgtacagtaaatccgggttaaggcggcttaaactacgcggcagcggatgcgccgtcagttctgcctgcgtaggctgaacgctgtcgctgtcgataaagcgcacctggatgtactcttccagcacgcgccgcgcctgctcttcatcgctgccgctaatgttcaggctgcaactgtcattaaatagggtgccggtgccaatcagcgccaggctgcttttcgcatctgcctttgcgttctggcgatggttaataaaagtgatttcgctttgccactggctgcactgttctttaagttcccacgccggacgagcatgtagaccgttaggcaaaggacagagaaattgaatcgttaacataaccgctccgggttaatcaggagatcatctgaaatccgtcagttgaacaaccgtctcacgcgtaagacgttgaataagggcagataaaagttgctgcatctgcaaaatgtcgcggcaatcggcaatgcttgcggcgcaatgtccatggcgggttgctggccccatcaccactgtgggcacgccggtgccggttaagtgcaccgccccgccgtccgtgccgccgttgctgaacatatctgcctgcaacggcacgccaatttctgccgccacggtttcgacccaggcggtaagttttggcggcgcaatcaggctcttgtcgcttaacaccagcatcggcccgttaccaatctggcgatggttagccgcgccataatcaaagtttttcgcccagcaggcggtatcaagcacaatggcgacgtccgggctcaccgcgcgggtggcagtttgcccgccgcgtaatcccacctcttcgctggaacttgccaccagccacacttccgcaggtagttcggcgtcgtgcagttcgcgcagtaacgtcaccagcagatagcaaccgaggcggtcatcaaaggctttccccatcactcgctggtgagggagaacctgaaaagtggtatcaaacgtgacgcgatcgccgggacgaattcccgcctgcatcacttcgtcataggagcgcgcaccaatgtccacgcgcatggcgctgacgtcattcccctgccggtcgccgtcaagcaggcctggaattttgcactcttcacgggtggtgatgcgcaccggctgcagctggcgggcagccatgcgtacgttgccaaccggcagcacatcaatcgccccttcgcgggagatgctgcgcaccataaatcccacttcgtccatatgcgcacagatcatcaccttcggacctgtgctttcattcaggcggatcagcacgcttcccagaccatcaaatcgcacttctttttgcaggcgatccgcttcttccagcaggatctgccgcacttcctgttcgctggaggcgatcgcatctgcctcgctcaacgcttttaataggcttaaatccattatgcctctcccgtgagcaacactgttttcggcatggcgtagagcacttctgcgccttgcggggtaaccagcacaacatcttcgatgcgcacgcccccttgccctggcaaataaatccccggctccacggtcagtaacatgcctggctgtagcgtcgtggtgtcccgcggactaaaacgcggatcttcatgaacttcaatgccgatagcgtgaccggtgttatgaccgaaatagtcgccataacctgcttctgtaatgacccggcgcgcggcatcgtcaacctgctggcagcgcacgccggggcgaatcgcggagattgctgcgagctgtgcctgcaggacaatttgatagacgttaaacagcaggtgagattcggcgctcaccccttcgccattcaccagcaaggtgcgcgtcatatcagagcagtagccctgatacagcgcaccgaaatcgagagtgacaaactcgcccgctgcaacaatcttgtcgctggctttgccgtgcggcagcgccccacgccagccactggcgacaatggtgtcaaaagaggctttttctgcgccctgctggcgcataaaccactccagttcagcggctatctcgcgctcgctcatccccgcctgaataaagcggcgaatatgctctgcaccgcgatcagcaatcccacaggcgaggcggattttctccacctcctctggcgttttgatttgccgcagcacatccggcgtggcgctaaccagtttcgcattgagttcagactgccagcggtgcgcggtttcccaactcacctgctggccctcaaaaccgagcgtttgcaactgttcatcggcaatgatttgattgacgatagtggtaagcgtgttcgtcgcgtcaagcaaatgcagctggtagccttgcgcacgggcttccacctcaacgtaatagcggctatccaccagaatgtgcgcactttcacggctaatcaccacataaccacttccggtggagatccccagatgcggctgtttgttctgccgactggagagaagcactgcatccagttgttgcgccttaagccagtcgcgcaggctagcgagtaatgtcatctggattttccttcttacaggctatcgattaacaatttgcctttacggaacatcatcagacgcaggaacaccaccatcagcgcagttatgactgcccccagcgcgatccccgccatatagacgcccaggttagtgaccagcggccatgcccagatagcggactccgggaaccattgcactgcgcccagccagacagcggcggtactgccgacaatagcgccgaccatatagctcggaatggcggtgatagggctttccagcgcaaacggaatcgcaccctcactgatccccataaacgccaggaacatggcggtcttaccctgcggataaagttgagcgttgaacaggcgtttgccggttaaacgacggtcgataatggtcgccagccccagaccaatcggcggaataacgatagcgatagaacgagcggtgaccggtaatacgtggtcagtggtaaagctgaaggcaacaaaacctgcggctttgttgatcgggccaccaaggtcgattgctgtcgccgcggcgatccccattgcgtacatcagcgcgcccttctcacctgcggcagtcagcacagtacggataccgccgttgatccagccaccaaagggggtgatgacgtagtacatcgccagcatgacaaaaatggcggaaagaatcgggagcaaaaatgtggttttgaacgctaacaggaaatccggtaactggattttctggttcatccacttcacaaggtaaccggcaacgatagaaataatcagcgcaccaatgaaggtggacggcaccgggctagaggtcgcccattgcatagtgctgggatcgaagttcagcagttgcgtcggctgggtagacatcaacccgccgataaaaccagccgggaacgccagtttgccaccgatagagttcgccacaaaagcagcaaacatcggaatggcaaaaccaaacaacacgccgccgaaggactggctcagccaggcaaatttaagtaaggagaggtcgaaaccggagaatttcccgctattaagagcatccatgatgccgatctcagcaggaattttaagccagctataagcaatcagctggctgaaagcgaggatcacaccgcccataattaaggtcggcaccatgcgactaatcccactcatcacatgctgcgggagttcaccccagaagctggttttagaggcctgcggattcttaactgccgctgccgcaccggatgcgccaggcacaacggttgcactgcgttttttaatggccataacaattatccctgtcgaatattactgttgttcagaggcaatcatctcttcgatttctttgatgatgcccgcagcgtttttaattgcgtcctgcaaagtgatttcataaacgtcgcgactttcgaaacgttcgttatcttccggggtaactgccacggagtggatgatgatggtcgcttcggcgatatcctgcgccgtcaggcgattctggataccgtccgcgccctgggtttcaattttcacttcataaccggcttctaccgccgcttcttccagcgcctgagcggccataaaggtgtgagccaggcccatcgggcaggcacataaggcaatcagtttcttactcatcgttaattcctcgttcagtgatagttgacgagtgaaattatgaacgtgcaaaacaaatcgccgttaccagacaaataatgcatttactggagaattaatcccgctgtacggaagtgtgacgcaggtcgaccttgtgaggggacacaaagaaaaattgaataaactgtatgatttaaaagattatcgggagagttacctcccgatataaaaggaaggatttacagaatgtgacctaaggtctggcgtaaatgtgcaccggaaccgagaaggcccggattgtcatggacgatgagatacaccggaatatcatggacatattctttaaagcgccctttatcttcaaatgcggcacggaaaccggaggctttgaagaactcaaggaagcgcggcacgataccgcccgcaataaacacgccgccaaatgtcccgagattgagcgccagattgccgccaaaacggcccataatgacgcaaaacaggctcaatgcgcggcggcaatcggtgcagctgtcagccagcgcgcgttcggtaatatcttttggcttgagattttctggcaggcggttgtcagctttcacaattgcgcgatacaaattcaccagcccagggccagaaagcacgcgctccgcgctaacatgaccaatttccgcacgcaatatttcgaggataatggcctcttcttcactattcggcgcaaaatcaacgtgaccgccttcgcctggcaagcttacccaacgcttatcgacatggaccagatgcgcaaccccaagccccgttccggcaccgtaaaccgcaataggcttaccttcgaccggttctgcgccaccaaactgaatcagatgctcttttttcagcatcgggatcgccatgcttacagcggtaaaatcgttaataatttccagatggctaaaaccgagattctttttcatttcggcaatactgaacgcccaggtatggttggtcatcgccacccagtcaccggtaattgggcaagcgatggcaatacagccgtctttcacctcgaccttatgttcttcaagataaacgcgaatgaccgcttcgaggctggggtaatcaagcccactataggtcttagcctggctgatttcaccactggcaatatcacacagagcaagacgtgcgttggtgccgcccacatcaccgactaatgcatactttgtcattcttcaactgctccgctaaagtcaaaataattctttctcacactgtaaatacctgggggcataacaacaacgccggaaaggcaggctccctgtaaatatcgatctgggtcacacaattactttatcgtttcagcaccaattgcagcgatgcctttttgcaagctgggcaaactaagtatctgaccccgcataaggaatagaacacaggcggcactaacccggacgtagactgtattacaaaagcggcaaaaagcagagacaaaaaacccccgctttgcagcgagggttggaaatttggtggagctaagcgggatcgaaccgctgacctcttgcatgccatgcaagcgctctcccagctgagctatagccccacgatgcgtttacgtaccaagtttgctgggtgcaaaatttggtggagctaagcgggatcgaaccgctgacctcttgcatgccatgcaagcgctctcccagctgagctatagccccgtcacgtaaagcttgtcgagttgacgggcggcatcatatgaattccgcccgaatgtgtcaacggcaaattgcaacgtgtagtttcaatcgctgaaaaatcaggcaaatgaacaattttggaaaaccgctcgcattcagtagttattcatgtcacggtttcctgtaaagtggtgttataaaatgaactactaatagacccacatacattcagggaattgttatgttcaaggagaggatgacaccagatgaacttgccagactgaccggctatagccgccagaccattaataaatgggtacgcaaggaaggctggacaacgagtccaaaacctggcgtccagggtggcaaagcccgactggttcacgtcaatgaacaggttcgtgaatatattcgcaatgctgaacgtccagaaggtcagggagaagcgcctgccctttctggtgatgcgccgcttgaagtattgctggtgacactggcgaaagagatgacgccagttgaacaaaaacagtttacatccttgcttctgcgggaagggattatcggattgttacaacgcttagggattcgcgatagcaaataatatgaaaagattacgcaataaaatgaccaccgaagaactggctgaatgcctcggtgtggctaaacaaactgttaaccgttggatcagagaaaaaggctggaaaacggaaaaatttcccggcgtgaaaggcggtcgtgccagacttattctggtcgatacgcaagtttgcgagtttattcagaacacgccagccttccataacacaccaatgttgatggaagctgaagagagaattgctgaatacgctcctggagcacgcgccccggcgtatcgacaaatcatcaacgcgatagataatatgacagacattgagcaggaaaaagtcgcgcaatttttgagtcgtgaaggaattcgcaatttcctcgcccgtctcgatattgacgaaagtgcataaataaaaaacggcaggatattatctcctgccgtttatctttttacacgctaattactgctgattttcgcgttcagcaataaaatccagcgctttgttgatacgctcgatactgcgggtcttaccaattgcgtgaacggtaacatccagtgctggagactgccccgcaccggttacggcgacacgcagcggcataccaactttacccatacccacttccagctcatccgccgtcgcctgaatagcgtgatgaacgttttcagcggtccagtcagtaatcgcggccagtttgtcacgaaccacttccagcggctgacgcgctaccggacgcagatgttttttcgcggcgtcggcatcgaactcagcaaaatcttcgtagaaataacggcagctctgtgccatctctttcagcgtcttgcagcgttcgcccagcagtttcaccagatcagccagctgcgggccgttacgggtatcgatattttcctgctcaatgtgccactgtaagtgagtagcaacatactccggcggcagcgcgttaatgtagtgatggttcagccacagcagcttgtcggtgttgaacgcactggcagatttgctgacggcattcaaagtgaagtatttgatcatctcttcacgagtgaagatttcctgatcgccgtgggaccagcccagacgcaccagatagttcagcagtgcttctggcaaataaccgtcatcacgatactgcattacgctgactgccccgtgacgtttggacagttttttaccgtcatcgccattgatcatagaaacgtgcgcgtaaaccggcaccggcgctttcagggccttaagaatgttgatctggcgtggcgtgttgttgatatggtcttcgccacggataacgtgggtgatttccatatcccagtcatcgacaaccacacagaagttataggttggggaaccatcggtacggcggataataagatcgtccagttcctggttgctgaactcgatcggaccacggatctgatcgtcaaaaacaacagaaccttcctgcgggttagcaaaacgtacaacacacggttcatcatcagcatgatgctcatggctgtggcggcagcgaccgtcataacgcggcttctcacctttcgccatttgctcttcgcgcagcgcttccaggcgctctttagagcaatagcatttataagcagtgccctcttccagcatctgatcgatcaccgcgttgtagcgatcaaaacgtttggtctggtagtacggaccttcatcccactccaggctcagccagttcatgccatccataatggcttcgatagcttccggcgtggaacgctcaagatcggtgtcttcaatacgcagcacgaactcaccgccgtggttacgtgcaaaaagccaggagtaaagagcagtacgcgcgccgccaacgtgcagatagcctgttgggcttggcgcgaagcgagttttgattttcatgaaatggccttacgtttagaaagatgccgacaaccggcaaatcctggaaaaattaagtgggcgatattctatcactcccgcctgattcctcaatgtagttcgggtttctaccttacgcattattgttttcgttgacaaattgcgcaacacggtctgttttgcgatcatcttgcttaaatttacgacgaacgaacaatttctttagaaaatgcgttgactcattttgaactctccctataatgcgactccacacagcgggggtgattagctcagctgggagagcacctcccttacaaggagggggtcggcggttcgatcccgtcatcacccaccaactactttatgtagtctccgccgtgtagcaagaaattgagaagtgggtgattagctcagctgggagagcacctcccttacaaggagggggtcggcggttcgatcccgtcatcacccaccactttctcgccagctaaatttcttgtaaaaatgtgaagtaccgaagtgggtgattagctcagctgggagagcacctcccttacaaggagggggtcggcggttcgatcccgtcatcacccaccacttcgggtcgttagctcagttggtagagcagttgacttttaatcaattggtcgcaggttcgaatcctgcacgacccaccaatgtaaaaaagcgccctaaaggcgcttttttactatctgcgatactcaaagattcgaacctgcagcaggtttgagttgagcgcagcgaaacaacggagccgctcgtgctggcgacggcccgaagggcgagcgaagcgagtcatcctgcacgacccaccaatgtaaaaaagcgccctaaaggcgcttttttgctatctgcgatttgcgaaattgcctgatgcgcttcacttagcagactactatttccggcaattcctgtctcctcacttactgtgtcaatgcagccaacagcttaaccatcgcgggcgtcacctgctgtgtttcataaacaatatataaatctgcagggatgcgctgtttgagcggacggaaaatgacacctggccagttcatttgtgcgtagctgtccgctatcaatgtgataccaatgcccatactgaccatagcgagtaccgtttgcggttcattaacttcgcgaataacaaccggactaaatcccacctgctggcaaactcgctgcaaaaaatcccagtcagtgtaaacgggcggcattgtaacaaaatactcgtcacgtagcgcttccagcgggacggtggaaaaactactgagatgatgctcttcaggcatcgccaccagaaacgcgctttcatgcaaccgtaagctggtaaaaccagtcggtggttctgtcgccattcgccagatcccggcatcaagttcgcggcgttccagcaaggccatttgcatcgcgggcatcttttcgcgaaaaagaacgtcaacgttaggattttccctgaggaatcgccgcataaccgggcgcatccgtccccacattgccgttcccactacgccgagttcaatccgccctgcttctccccgacctatttgttcaatccgagccaatacattattagcattcaccagcaatcgacggctttcttccatcaagattttgcccgcgtgtgtcagtacgacgctgcggctatggcgaataaaaagctgcgtgccgagttgattttccagctctttaatatgaatgctgagcggaggctgagacatatttaaacgcgctgctgcgcggccaaaatgcaactcttccgctacggcaagaaaataacggagcaacttaagatctgttctgtatacgcgttccataattaagtgctccatataataaatacatcgtattaaattatcatggcataaagtatttcaccaccagatatccgacatacataaacacaatggataatatacccggtaatacatttggtacaggaataggcaagcgcacgattgtaaacaaagcaccaataccaaaaccaacgccggaagaaaataaaatatctttcactaattaacctttatcataaaagcagctctgaagagcagagccgcgaatccttttaatgagtcaccgctcgatgctttatcttttcagggtcatgattatatttaaacccaaagaaaaatatcactgcgagaaaaagagcatatcctgcaaacaccagccagatagtttgccagtcttttacgccatccacgctaaagtaatctactgccatgccactcagaatgctgccaacccatgcgccgacaccatttaccatggtcataaagagcccctgcgcgctggcacgaatgctggaatcaacttcctgttcgacaaatacgctaccagaaatattgaagaaatcgaatgcacagccataaacaatcatgctcagcagcagcaaaataaatccggttgtactcggatcgccataggcgaagaagccaaagcgcagcgtccaggccaccatactcatcagcatgacggttttaatgccaaatcgctttaaaaagaatgggatagtcagtataaagcccacttctgccatctgactaacactcagtaaaatggagggatatttcaccacaaaactgtcagcaaactccgggttacgggcgaaatcatgtaggaacggattaccaaaaacgttggtaatttgcagtaccgcacccagcatcatggcaaagaggaaaaagatggccatgcgtggatttttaaacagcacgaaggcatccagacccagcttgctggcaaggcttgtggtcgcttttttctccgcaaccggaatcttcggcaaagtcagcgcataagcgctcagcagcaaactcgcaccggacgcgatatacagctgcagactactcaattccagatgcagcaggcttactgcccacatcgcgacaatgaaccccaccgtaccaaaaacgcgaatgggcgggaaagcggtcaccgggtcaagccctgcctgggcaagacaggaataagagacgctgttgcttaacgcaatagtcggcataaacgccatcgcattgactaacatcacccaaaacatcatatccggatcagttacggatgccgcataaaaaagtacgcccgcacacaccaggtgacacagcatgtatgcacgttctgcgcgcagccatttgtctgcgatgatccccattataccaggcataataatcgcggcgatccctttggaactgtaaaccatgccaacattagcgccggtgaaatgaagagtattaatcatgtaagagccgagggtaaccagccagctcccccagataaaatattgcaaaaaggacattacctttaagcgcatcgcgatgctcataatcgtttccttgtcgcatcatttggcctcacccgcgaggccgtttcttattgtttttctcaggcaattttgcgcagaaagccacaaataaggttgatgaagttctgcttagagagctccgcagccgccagcgtttgcgcatgactcaatttcacatcgcttaaaccttccgccatattggtaatcgcagagaccgcaacgactttaaggtcgcaatggcgagcactaataacctcaggcaccacagacataccaacaacatccccaccaataatttgcatcatgcgaatttccgccgcagtctcgaaattcggccccggatagctgacgaacacgccctccgtcagagggaaaccctcctctttcgccactttttgtaacagtgcgcggtattccgcatcgtaggcatttgccagactgaagaagcgctctccaaaacgatcatcgttaagacccaccatcggcgtaccgggcatggtgttgatatgatctttcaatgcgaccaggctgcctgcccccacttccggacgcaggctgcctgccgcattggtgcagaacagtagctcgcagcccagcagcttaaaggtacgaattgcgtcagtcataatggtcattccacgaccttcgtagaaatgtccgcgacctttcatacataccaccggtacgccctggagatggcccagcactaactcccccgcatgaccatgtaccgtacttaccgggaagcccggcagcttttcgtaggaaattgcgacagcgttctcaatctgatcggccagcgcgccgagcccggaacctaaaataaaggccactcgtggcgtgaaatcaggtttataagtcttgataatatctatgcaaaacagcgggttatgagaaaattgaacctgagacatacatatcctttttctgtagggtggaatctaacgcctttttatagcgaggttgtcccggctcttaccaatacacttttctcacgcattcaatagcgattcgatatcgatggatttatatcttttttctattaatccacggtaaaaactgtattggcgatattaattcctttgcattaacaatatgtcgtttttagcaaaccactttattaagcaatctactaataacgatcggcatagggaattatgctatgaaaaaacatcttttaactctgacactttcctctatattagcgatacctgttgtatctcatgcagaatttaaaggcggttttgcagatatcggcgtgcattatctggactggaccagccggactaccgaaaaaagcagcaccaaaagtcacaaagatgattttggttatcttgaatttgaaggtggcgctaactttagttggggagaaatgtacgggttcttcgactgggaaaacttctataacggtcgccataataaaccaggtagcgagcagcgttatacctttaaaaataccaaccgtatttacctgggtgacaccggatttaatctctacttgcatgcgtatggcacctacggttctgcgaatcgcgtgaatttccacgacgatatgttcctgtacggtatcggctacaatttcaccggcagcggttggtggttcaaaccgttctttgctaagcgttatacagatcaaacctattacactggcgacaacggctatgtcgccggctgggttgcaggttacaactttatgctgggcagcgagaaattcactcttaccaactggaacgagtacgagtttgaccgtgacgctacctatgcagcgggtaatggcggtaaagaagggctgaatggcgcagttgcactgtggtggaatgcaacaagtcacattactacggggattcagtatcgatatgcggatgacaaactgggcgaagatttttaccaggatgcgataatctactccatcaaatttaacttctgattgattactgccggggctcccggcagtatgaattcactttatatctgatacaacggatccccttcccgcccagccattagcgcattgccctggtctcgtaccacgtcccataaagcttcagcggcggtggaaagactacggttcttcctgcgcaccagcatcaactggcgttcaacaaccggcgtaatgcgctttaccaccagtgggctaccttcaggcaatggtagcgccagtgcgggaagaatactgatgccgatgcctgcggctaccatcgggaacagcgtcgccggatgtccaatctcctgcacaatattcgcctgaataccattgcgcgccagcgctgcgtcaatcagcggtcggctgccactcgcgtaatcctgcaacaccaatttcgctccctgtaatgcctgccagggtacataatcttccacggccaaagcgctatcgcgatggcaaagcagaaagaaaggctcggaaagaatcgcttcacattgcagatcgcccactgggcctggatcgatgacgatgccaaaatcgacatctccctggcgaatactttccattacccactgctgcggacgatcgtgcaggacaaactgaatatctggatagcggcgatggctttcagcaatgcattgcggaataagatgcgcggaaatggtctggctggcagcgacccgaacttttccgctcagttgttgccccatacgcccggtatcgcgcaacgtgctgttcagttcatccagcagtcgctcaagacgcaaagccagctgctgccctgcatctgtaagcaccacttcacgcgtggttctgtccagcaggcgaacaccagtatgattttccagttccttcacactgtgactcactgcgctctggctcaggccgatacgctctcctgcacgactaaaacttttctcctgcgctactgtgacgaaaacctttaattgttttaaagaataattcatctgttttcttcatgaatggatgcaataaatcaattttatttctcaaactggaagaagcacaatagaaccatcgatcatctggagtctttatgaaactttttcgtatcctcgatcctttcaccttaaccctgatcacggtggtgttgctggcctctttctttccggccagaggcgatttcgtccccttctttgaaaatctgaccaccgcagctattgccctgctgttctttatgcacggcgcgaagttgagccgtgaggcgattattgctggcggtggtcactggcgactgcatttgtgggtaatgtgcagcaccttcgtgctgtttccgattctgggtgtactgtttgcctggtggaaaccggtaaatgtcgacccgatgctctactccggttttctctacttgtgcattctcccggctaccgtgcagtctgcaatcgccttcacgagtatggcgggcggtaacgtcgcggcagcggtttgttctgcgagcgcatccagcctgctggggattttccttagtccattgctggttggtctggtgatgaatgttcacggtgcagggggcagccttgagcaggtcggtaaaattatgctgcaactgctgctgccgtttgtgttggggcatctttcccggccgtggattggtgactgggtgagccgcaataaaaaatggattgcgaaaactgaccagacgtccattctgttggtggtttatacagcgttcagcgaagccgtcgttaatggtatctggcataaagttggctggggaagtttgctgtttatcgtggtggtcagctgcgttcttctggctatcgtgattgtagttaacgtctttatggcacgccgactgagcttcaataaggcagatgaaattactatcgtcttttgtggtagcaaaaagagtctggcaaatggcatcccgatggcaaacattctgttccccacaagcgtgatcggtatgatggtgctgcccctgatgattttccatcagatccaattgatggtctgtgcggtgctggcgcgtcgatacaaacgccagaccgaacagttacaggcgcagcaggaaagcagcgccgataaagcttaaagcggacgcttcaggggctggaccagttgcgtcagcccctcggttttaatcagcagcgtgatttgcattagctcaccgagcttccctgccgggaactcatctttgcgggcaaaccacagcagatactcctccggcaggtcgattaagcgacgccctttgtatttgccaaacggcattatcgtattggctatttcaatcagctgctctttttccatctcagctacccagcaaacgcagcatttccgcttcgtcgatgacttcaatgcccagttcctgcgccttcgccagtttagatcctgcagcttcacccgctatcaccagatcggttttcttgctcacgctgcccgcgactttcgcgcccagttcgaccagtcgagctttagcgtcatcacggctcatctggcttaagctgcccgtaagcaccacggttttaccagcaaacgggctgtcaatctcttccgcgttgataacgatcggcgcaggccagtgaacaccttccgccaacagctcgctgatgacattgcggttgctttcttcggcaaagaagttgtgaacgtgggatgcaacgacaatgccaacatcaggcaccttttgcagctcttcaatgctagcggcttccagcgcttccagcgtgccgaaatatgccgccagacctgctgcggtggcctcgccgacttcacggatgccaagtgcatagaggaagcgagcaaaggtggtttctttcgctttttccagcgcgttaaccacgttttgtgcgctttttggccccatacgctccagtccggtcagtttgcctgcggtgagtttgaacagatctgccggagtatggacatattctttttcaaccagctgatcgatgattttgtcgcccattccgtcaacatccatcgcacggcgggaaacaaagtgtttcaggctctctttacgctgcgcaccgcaaatcaggccaccggtacagcgggcaaccgcttcaccttccacacgctcaacgtcagaaccacataccggacaatgcgtcgggaatacaacctcacgggtatcttccgggcgttcagaaagcacgacgttaaccacctgcgggatcacgtcgccagcgcggcgaatcaccactttatcgccaatgcgtaaaccaagacgttcgatttcatccgcattgtgtaaggttgcgttactcaccagcacgcctgcaacatggacaggttccagacgcgcaacaggcgtaatcgcgccagtacgcccaacctgaaactcgacgtcacgcacaaaggtcatctgctcctgcgccgggaatttaaacgctaccgcccagcgcggggcacgcgcgacaaagccaagctgctcctgctgtgccagactgttgaccttaatcaccacgccgtcgatatcaaagcccagcgtcgggcggtcttcttccactttgtgatagaacgccagcacttcttccgcgctttcacaaagcgttacccgatcgctgaccggcaacccccactttttaaattgcagtaaacggccaagatgagtatccggcagctcgccaccttccagaacaccaacgccatagcagaaaaaagtgagcggtcgcttcgctgtaatacgcggatcaagctgacgcagactaccagctgccgcattacgtgggttagcaaacactttcccgcccgtgcgtcgcgcatcttcgttaatcttttcgaaccccgcctgcggcaggaacacttcaccacgcacttccagacgcgccgggatattctctccgtgcagcttcagcggaatggcgcgaatagtacgcacattagacgtgatatcttccccggtggtgccatcgccacgggtcgcggcactgactaaaacgccattttcatacagaatactgacggcaagaccatccagcttcagctcacagcaccaggtgactttctcgttgtttttcagacggtcctgcacacgtttgttgaaagcaagaaagctttcttcatcaaaaacgttatccagactcagcattggtacttcatggcgtatctggctgaaagccgccagcggcgcagcgcctacacgttgagtagggctatcaggcgtaatcagttctggatgtttggtttccagctcgcgcagttcgcgcatcagcctgtcgtattcagcgtcgggaatttccggcgcatccatcacatgataaagatattcatgatggcgaagcgtcgttcgcagttctgtcagttgttgttcgatactttccatatcgcaccatcaatgctaaaaacccccgacaagcgggggttcgaagaggagttaatttgccttaagtgtatcaggcgttggcgtctttgacttcgcggatgatgtcctggtactcgcgcaatttctgcggagtcatcatacggcgctgatcgtcaagcacgacaccgcccacttcatcggcaatatgctgcgcagattgcagcatcagcttgaagttctgcagctcgtcaccgtaagacggtacctgcataaagatagtgacacccggagtagtgaaatccttcatttcaggatcaaaggttcccggtttcaccatattcgccaggctgaataacgccgggccgctgccatccgggctaagatgacgatggtaaatattcatatcgccaaaaatgaagcccgcttgttgaatgctgttaagaagcagttcaccgtttagctcgctaccgtgatgcgccgcgacgttcatgataatcaccgcttctttgcgcttcggtttatccataactggagcaggttccgctacaggctcaggctgtggtgccgctacgggttctgcaggctggaaagcctgttgtgccggttgcggtgcactatgcacaggctgcggcgctggcgcgacctgtgggctaactggctgctgcaacggctgttcaggctgcggctgataggcaggctgctgcaccggctgcgctggatgcggagcatgttgcggcggtacctgcgcttcaggcggctgctggaccggttgacgcggctgcgcagacgcataaggcggttggtactggtgttgcgggctcggacgagcagcctcatgctcctgagcgttagccggggcatgattcacgcggtgaacacgaacctcaccaacgccctcatcatcttcgacatcctcgtcataagaatcgtcgtcacgtttactcttcattcgttttaatggccgatcgcggaacatagaagatcgttctttacggctggtccagaaaccatgtaccagtaaagcgattatggcgatcgcgccaacaatgattaatatcagacgcaaatcctgcatcattatattctctgttgttctaacaccttgccaccacggcaaacatttactcactaagagtatttgccgattacctcaagtgcaagtgcactattaactttcacagcacaaagatagatgaaatcgtgctttttgctgttttttcgaacatatcctaactgtccattgcgcaattacccggtaaaatacgcagaattttcctgggattggtcaaaaggagctcatcctgattatggttagtagtttcacatctgccccacgcagcggtttttactattttgcgcaaggctggaagctcgtcagccaacctgggattcggcgtttcgttattttaccgctgctggtcaatattttgttgatggggggcgcattctggtggctctttacacagctcgatgtctggatcccgactctcatgagttacgttccggactggctacaatggctgagttatctgttgtggcctctggctgtcatctctgtgctgttagtgtttggctatttcttctccacgattgctaactggattgccgctccgtttaacggtttattggctgaacaactggaagcacgattgactggcgctacaccgccagataccgggattttcggtatcatgaaagatgtgccgcgaatcatgaaacgcgaatggcaaaaatttgcctggtatctgccgcgcgcaattgtattactaattctttacttcatccctggtattgggcaaaccgtcgcgccggtactgtggttcctgtttagcgcctggatgttagccatccagtattgcgattaccccttcgataaccacaaagtgccgtttaaagagatgcgcaccgccctgcgcacacgcaaaatcaccaatatgcagtttggtgctttaaccagcctgtttacgatgatcccgctgcttaatctgttcatcatgcccgttgccgtttgtggcgcgacggcgatgtgggtcgattgctatcgcgataaacacgcgatgtggcggtaacaatctaccggttattttgtaaaccgtttgtgtgaaacaggggtggcttatgccgccccttattccatcttgcatgtcattatttcccttctgtatatagatatgctaaatccttacttccgcatattctctgagcgggtatgctacctgttgtatcccaatttcatacagttaaggacaggccatgagtaagatttttgaagataacagcctgactatcggtcacacgccgctggttcgcctgaatcgcatcggtaacggacgcattctggcgaaggtggaatctcgtaaccccagcttcagcgttaagtgccgtatcggtgccaacatgatttgggatgccgaaaagcgcggcgtgctgaaaccaggcgttgaactggttgaaccgaccagcggtaataccgggattgcactggcctatgtagctgccgctcgcggttacaaactcaccctgaccatgccagaaaccatgagtattgaacgccgcaagctgctgaaagcgttaggtgcaaacctggtgctgacggaaggtgctaaaggcatgaaaggcgcaatccaaaaagcagaagaaattgtcgccagcaatccagagaaatacctgctgctgcaacaattcagcaatccggcaaaccctgaaattcacgaaaagaccaccggtccggagatatgggaagataccgacggtcaggttgatgtatttattgctggcgttgggactggcggtacgctgactggcgtcagccgctacattaaaggcaccaaaggcaagaccgatcttatctctgtcgccgttgagccaaccgattctccagttatcgcccaggcgctggcaggtgaagagattaaacctggcccgcataaaattcagggtattggcgctggttttatcccggctaacctcgatctcaagctggtcgataaagtcattggcatcaccaatgaagaagcgatttctaccgcgcgtcgtctgatggaagaagaaggtattcttgcaggtatctcttctggagcagctgttgccgcggcgttgaaactacaagaagatgaaagctttaccaacaagaatattgtggttattctaccaagtagcggtgagcgttatttaagcaccgcattgtttgccgatctcttcactgagaaagaattgcaacagtaatgccagcttgttaaaaatgcgtaaaaaagcacctttttaggtgcttttttgtggcctgcttcaaactttcgcccctcctggcattgattcagcctgtcggaactggtatttaaccagactaattattttgatgcgcgaaattaatcgttacaggaaaagccaaagctgaatcgattttatgatttggttcaattcttcctttagcggcataatgtttaatgacgtacgaaacgtcagcggtcaacacccgccagcaatggactgtattgcgctcttcgtgcgtcgcgtctgttaaaaactggcgctaacaatacaggctaaagtcgaaccgccaggctagactttagttccacaacactaaacctataagttggggaaatacaatgttccagcaagaagttaccattaccgctccgaacggtctgcacacccgccctgctgcccagtttgtaaaagaagctaagggcttcacttctgaaattactgtgacttccaacggcaaaagcgccagcgcgaaaagcctgtttaaactgcagactctgggcctgactcaaggtaccgttgtgactatctccgcagaaggcgaagacgagcagaaagcggttgaacatctggttaaactgatggcggaactcgagtaatttcccgggttcttttaaaaatcagtcacaagtaaggtagggttatgattagtggcattttagcatccccgggtatcgctttcggtaaagctctgcttctgaaagaagacgaaattgtcattgaccggaaaaaaatttctgccgaccaggttgatcaggaagttgaacgttttctgagcggtcgtgccaaggcaagtgcccagctggaaacgatcaaaacgaaagctggtgaaacgttcggtgaagaaaaagaagccatctttgaagggcatattatgctgctcgaagatgaggagctggagcaggaaatcatagccctgattaaagataagcacatgacagctgacgcagctgctcatgaagttatcgaaggtcaggcttctgccctggaagagctggatgatgaatacctgaaagaacgtgcggctgacgtacgtgatatcggtaagcgcctgctgcgcaacatcctgggcctgaagattatcgacctgagcgccattcaggatgaagtcattctggttgccgctgacctgacgccgtccgaaaccgcacagctgaacctgaagaaggtgctgggtttcatcaccgacgcgggtggccgtacttcccacacctctatcatggcgcgttctctggaactacctgctatcgtgggtaccggtagcgtcacctctcaggtgaaaaatgacgactatctgattctggatgccgtaaataatcaggtttacgtcaatccaaccaacgaagttattgataaaatgcgcgctgttcaggagcaagtggcttctgaaaaagcagagcttgctaaactgaaagatctgccagctattacgctggacggtcaccaggtagaagtatgcgctaacattggtacggttcgtgacgttgaaggtgcagagcgtaacggcgctgaaggcgttggtctgtatcgtactgagttcctgttcatggaccgcgacgcactgcccactgaagaagaacagtttgctgcttacaaagcagtggctgaagcgtgtggcagccaagcggttatcgttcgtaccatggacatcggcggcgacaaagagctgccatacatgaacttcccgaaagaagagaacccgttcctcggctggcgcgctatccgtatcgcgatggatcgtagagagatcctgcgcgatcagctccgcgctatcctgcgtgccagcgctttcggtaaattgcgcattatgttcccgatgatcatctctgttgaagaagtgcgtgcactgcgcaaagagatcgaaatctacaaacaggaactgcgcgacgaaggtaaagcgtttgacgagagtattgaaatcggcgtaatggtggaaacaccggctgccgcaacaattgcacgtcatttagccaaagaagttgatttctttagtatcggcaccaatgatttaacgcagtacactctggcagttgaccgtggtaatgatatgattagtcacctttaccagccaatgagtccgtccgtgctgaacttgatcaagcaagttattgatgcttctcatgctgaaggcaaatggactggcatgtgtggtgagcttgctggcgatgaacgtgctacacttctgttgctggggatgggtctggacgaattctctatgagcgccatttctatcccgcgcattaagaagattatccgtaacacgaacttcgaagatgcgaaggtgttagcagagcaggctcttgctcaaccgacaacggacgagttaatgacgctggttaacaagttcattgaagaaaaaacaatctgctaatccacgagatgcggcccaatttactgcttaggagaagatcatgggtttgttcgataaactgaaatctctggtttccgacgacaagaaggataccggaactattgagatcattgctccgctctctggcgagatcgtcaatatcgaagacgtgccggatgtcgtttttgcggaaaaaatcgttggtgatggtattgctatcaaaccaacgggtaacaaaatggtcgcgccagtagacggcaccattggtaaaatctttgaaaccaaccacgcattctctatcgaatctgatagcggcgttgaactgttcgtccacttcggtatcgacaccgttgaactgaaaggcgaaggcttcaagcgtattgctgaagaaggtcagcgcgtgaaagttggcgatactgtcattgaatttgatctgccgctgctggaagagaaagccaagtctaccctgactccggttgttatctccaacatggacgaaatcaaagaactgatcaaactgtccggtagcgtaaccgtgggtgaaaccccggttatccgcatcaagaagtaattcttgccgcagtgaaaaatggcgcccatcggcgccatttttttatgcttccgccagcggcggcaaaatcaattcatcgctctcatgctgctgggtgtagcgcatcacttccagtacgcgcaaccccgctcggtgcactgcatcggttaacgccttccctttcagcaagccactgatgagctgagcacaaaacaggtcgccagtccctttcaggtcggtttttacccgactatgggaaatgacattcacgctgtcggcagtgaccaccacaacctgcatctcctgattttcttcattaccggaggcgctggtaaccaccacccattttaatgtgtcactaagcagactttttgcggcagcaatggcactgtcgagatcgcggcaatttttaccggtcaggatttccaactcaaagatattgggggtaattccctgcgccagcggcagtaaatattgtcgatacgcttcgggaaggtcaggtttgacataaattccgctatcaatatcgtcaatcaccggatcgaccatgatcaataggtcaggatggtctttgcgtagcgcagtcagccactcggcaaggattttgatttggcttgccgttcccatatagcccgtggttacagcacgaagttggcgcagcgcatcacgctcctgaagcgcacgcaaatagccgctaaaccattcgtccggaatcgcaccaccgtagaaagtgtcataatgcggcgtattgctcagcaataccgtcggcacggcaaagacattcaggccgttctgtttgatagcaggcacggcaatgctgttgcccacgctgccgtaaaccacctggctctgcacggcgacgatatccgcctgcagtgccctactcttatcgttaaacaacaacaaactactcatttaattttttctccttgccgatgatcctcatcgtaatccaaccgaaactttacctgattctggcagtcaaatcggctatcacaaaacaaggataaggtaattcaatgaagaaaatcatttgtctggtcattacactactaatgacactccccgtttacgcgaagttaactgcccatgaagaagcccgcatcaacgccatgctggagggattagcacagaaaaaggatttgatatttgtgcgcaacggtgatgaacatacctgctatgaagcggtttctcatctgcgtctgaagctcggcaatacccgtaaccgcattgacactgccgagcagtttattgataaggttgctagcagcagtagcattactgggaagccgtatattgtgaagatccccggtaagagcgatgagaacgcacagccttttttacatgcgttaattgcgcagacggataaaacggtgcctgcggaaggaaattaatccgctttgggaaggcatttacaggaggtaacatgaaaaaacgctttatttatcacgatgaaaaaagcaataaattttggtggatagattacgaaggggatagtttagctgtcaactatggcaaggtaggtagtattggtaaattccagacaaaagagttcgataatgaagaacagtgtctgaaagaagccagtaaattgattgccgcaaaaatgaagaaaggctatcaagaagatccaaagtttaacttcatggatcgctactattttgatgatgaagaaattgggttacatgttaaaacgagtcacccaaacttccagtgccattttactgatccactttatatgtgttgctgggatgaagaatctccttttggcagcgatgaaggtgctgatgctctaaacgttcttgaaaatagcctccgtaaagagccggatctggactgtgctgatttccctcaaatgttaattgaaactatgtggggtatgaaatacatcgctatggacagtattcttgaagaggatgttcgtgcgcaattactagtcgatgaaatgagcactatccagagcaatatgattacctacgcaactgcattcggtcagattaaagtcatgggtaaaatctcccataaacttaaaaagatgggactcaatgcactagcgcgtcatcagcttaccgcaaaaattcttcaatggggtgacggtcaggacagtccaatacttcaaaaaatgattgatgaccttacggcgtttcctcacgaaaattaaatactgcatttgtcggcagcaacaactgttaaaaaagtgcgctttgtttatgccggatgcggcgtaaacgccttatccggcctacaaaatcgtgctaattcaatatattgcagaaaccttgtaggcctgataagcgtagcgcatcaggcagttttgcgtttgtcatcagtctccgatgctattaatccttaaatccccgccccctggctaaaatgctcttccccaaacaccccggtagaaaggtagcgatcgccacgatcgcagatgatcgccaccaccaccgcgtcagggttagcttttgccacccgcagtgctccggcaaccgcgccgccggagctgacgccacagaatattccttcccgcaccgccagttcgcgcatggtgttttccgcatcgcgctgatgaatatccagcacctcatccaccagagaagcgttgaaaatccccggcagatattccgtaggccagcggcgaatgccgggaatgctgctgccctcttccggttgcaggccgacaatggtcaccggtttggattgttcgcgcataaagcgactgacgccggtgatagtgccggtcgtccccatgctggagacaaaatgagtgatgcgcccgccggtttgctgccagatttccggcccagtggtggtgtaatgcgcataagggttatcgggattattgaactgatcgagcagctttccttcgccacgattcgccatctccagcgccagatcgcgcgcaccttccatgccctgctctttggtgacaagaatcagttccgcaccataagcacgcatcgccgcacggcgttcctggctcatgttgtcgggcatcagcaatttcatgcgatagcctttcagcgcggcaatcattgccagcgcaatgccggtgttaccactggtggcttcgattaagacatcacccggtttaatttccccgcgcttttccgcctcgacgatcatgctaagtgccgcacgatctttcacgctacctgccgggttattgccttccagttttaaccacacttcactgccgttatccggccccattcgctgcaacttcaccagaggcgtattgcctattgtttgttctaatgtactcacgatctctatccatacgtggtgttgcctgatgcgacgcttgcgcgtcttatcaggtctacaggttacaaaccttgccattaaaaagcccggatcgcgggaagcgcctccgggcgtttaacattcactcaacctatcaggcgctttgtgcgagagcaagttcctcatcgcgggtttcgatacgctcgtcgccgttatacagccgcgcatgttgcagaccaacgaataaacgctcgccacgctgcggggcatcgtcgccatgcatcacgaccgtcagcggttcgttgtaccaccccagcggctgcaccactaattgggtgtagtgacctttcgggctggcttccagtacctgtaccggcagcgggctatcgaggctggtacggcggctgatatccacttcccaagggcgcaggaagagatccaccggcccctgatacgcaggtgtgtagcccagcggccagcgatgcgcgccaacatggaactgcccgccgcgaatggttccctgcaggcggttcacttcgcccataaattcgagcacaaaacggatcgccggttcgcgccatacctgatccggcgcgtcagcctgttcaatattgccctggctcatcacaactacacgatcagctacttcggtcgcttcttcctgatcgtgggtcacaaaaacgctggtgaattttagttcttcatggagttgacgcagccagcgacgcagctctttacgcacctgcgcatccagcgcgccaaacggttcatcaagcagcagaatttgcggttccacagccagcgcgcgcgccagcgccacgcgctgtttctggccgccggaaagctgcgccggataacgatccgccagatgggcaagctggaccatttccagcaattttgtcactttcgctttgatggctgcggcattcgggcgctcgcgacgcggcagcaccgtcaggccaaaagcgatattgtcgaacaccgtcatatggcggaacagcgcgtaatgctggaacacgaaaccgactttacgatcacgtgcgtgcaggcggctcacgtcggtgccgtggaagcgaatatgcccgctggtttgatgctccagcccggcgataatgcgcagcagcgtggttttcccggaaccggacggccccagcaacgcgaccatctgaccactaggaatatccagactgatatcgttcagcacctgggtgcgaccaaagctcttcttaatattggcaatctcaatgctcatgatgttcctcctgctgtgcgcgtttttcctgattctccaggcgccactgcaacatactttttaaaaacagggtgataatcgccatcagcgttaacagcgccgcagcggtaaaggagccgacggtgttgtagtcctgctccagcaattcaatctgtaacggcaggctcagggtttcgccgcgaatgctgccggaaaccacgctcaccgcgccaaactcgccaattgcgcgggcgttggtcaacaccacgccataaagcagcgcccagcggatgttcggtaatgtgacgcgacggaacatctgccagccggacgcgccaagcaaaatcgccgcttcgtcttcctggctgccctggcttaacatcaccggcaccagttcgcgcaccacaaacggacacgtcacgaagatggtgaccagcaccattcccggccaggagaacataatttgcaggttatgctcgtcgagccaaccgccgagcgggccgttagagccgtagaacagcaaatacaccagaccggcaaccaccgggcttacggcaaacggaatgtccagtagcgtcagcagtaactggcgtccagggaagttaaagcgcgtcaccagccaggccagcagaatgccgaacaccaggtttaccggtacggcaatcagcgcgatcatcaccgtcagccagatggcgtgcagcatgtccggatcggccagattctgtaaaaccggcatcagccccttgctgaatgcctgcacgaagatgtaaatcatcggcaccagcaggatgaacgcgctaaccagcatcccgatgccaatcagaaaccatttgccccagttaatcgggcgcgcgtcataacgcttcaattgggtaacttccgccattaatgacctaccacacgccgaccaaagcgactttgcagagtgttaatactgaacagcagcagcagagatgccgcgaggatcacgctagcaatcgcgctcgctgccgggtaatcaaactcctgtaagcgcacaaaaatcatcaggctcgtcacttccgtcttccacgcgatatttccggcgataaaaatcaccgcgccaaattcaccaagactacgggtaaagctcagcgccacgcccgccaccagcgccggagaaagctccggcagcaccactttgcagaaactctgccagcgcgttgcaccaagcgtttccgccgcttcttcatattccgggcctaactcttccagcaccggctgcacggtacgcaccacaaacggaatgctggtaaaggccatagccaccgcaatccccagccatgtataggtgactttgatatcaaacttcgccagccattcaccgtaaaaaccgtttacggaaaagaggctggccagcgttaaaccggcgacagccgttggcagcgcaaagggtaaatccatcagcgcatcaagcagcgtgcggcctgggaagcgatagcgggttaggatccacgccatcagcagaccgaaaacgccgttaaaaatgcttgccacaaacgcgctcagcagcgttactttgtaggccgcgaccacctgcgggttggtgatcacctcccagtactgcgcccagctcatctgggccagttgcatcaccagcgcggagagcggcagcagcaaaatcaggcacacaaacagcagactggtgccgaggcttaaggtaaagcccggcagcacgcgtctggaggagacagcaaacatcagttacgccccgccgctaacagcttgtctaactcgccgccgctggtgaagtgggttttcatcacttccggccaggagccaaatttgtcttccacgcggaacagctcggtctgcgggaatttgtctttcagtttgtccatcacctccgggttattcacgcggtagtaatagtcggtgatgatggtttgcgcctgcgggctatagagccagttcagataggctttggcggctttttccgtaccgttggcctgcacgtttttatcaacccacgccaccgggaattccgccagaatgttggttttcggaatcaccacttcaaagccctgcgcttcatactgtttacggatgttgttcacttcgctttcgaagctaatcagcacatcgcccaggccgcgctcggcaaaagtggtggtcgcgccacgaccgccagtatcgaacacttcaacgtttttcaggaactgggtcataaactgttcggttttgcctttgtcaccaccgtcagctttatccgctgcgccccatgccgccagataggtataacgcgcgttaccgctcgttttcgggttcgggaaaatcagcttcacgtcggagcgcaccaggtcgttccaatcgtggatattcttcgggttacccttacgcaccaggaagcccatggtggagtagaacgggctgctattattcggcaggcggctctgccagtcggccgggatcagcttgcctttatcgtgcaggatttgtacgtcggtcacctggttataagtgacaacgtcggcttttaagccctgtaaaatcgccagcgcctgtttactactcccggcatgagattgttttatcgtcagtttgtcgccgccgttatcttttgcccattgttgctcaaacggcggattcagggcggcaaacagctcgcgggagacgtcataagaactgttcagcagttccgttgcctgtacatggcccgccagcagcagagaagcgaccagcgcgagactgttctttttcagtaagttaacggccattgcgcacccttataaatttaatgactttctaatagccatcatatttataacggacgtgaaaggagtaacggttttatataccgtttggtgatttggaagttgaaaagggaataagaacttggttcaacaggcgtaattgttgcagtcagtttggacacgaacagcgcggagaaaccggagcgtacacatagtacgtgaggatttcgagcactgcccggggccaaaatgacaaataaaatagcctggtgaacttagttcaagacgaaatcctccccacaaatgcagggaggaaacagaggtgaatcagataccgacgctaaccgtctccggcagtgtgctgccgccatcaatcacattctgtgtaccggttaaatagctggattcatcgcttgcgaggaaggccgccagttcgccgacttccagcggatcggcgaggcgacgcatcgggattgctttcgccatttcagtcagcacgctctctggatcttccgggttgctctggcgggcaatgctttccgccattggtgtgcgcacgtatcccgggcaaatggcgttaacgcgaataccagactgcgcgtactccaccgccaggctttttgtcaggccaacaatcgccgctttcgttaaggcgtacgccgtttcgccaggatcggccaccatatcaccagtgacactagacatcatcacaatgcgaccatctttgcgggcaatcatctccggcagcaccgccttcgtgacgttccatacgcctttaatattgatgtcaatatggaaatcgcgatcgtcatcgctcatatcgaggaaactgcccagacgacaaacgcctgcgttattcaccaggatatcaatgcgcccttctttttccttcgcgcgtttgatagctgcggctacgctcgccgggtcacgcacatcggcgacaaccgccgtacagcgatgaccacgaccacacagttcgtccgccagcttttcgatctcaggggagatatccagcaagattaggttcgcgccatgacgtgcaaaagttctggcaattccttcgccaattccctgcaatgcgcccgtaatcagtgctgtcttgcccgtgagtttacccattttaatgctctccttgttaatacagagcgttacactccattccctctgaaaatacaggataaacaaaatattgctgcggatcagctcactaattcaggaaaatctcaatccagtcgctgctttatgcatcatttcaggcgttgtgttagctcactgctgcgctgaatcattttcaaactctccacatcattgagttgcacaaggccaacaaacagtaaatcggtaacagaattttgcgccgtgcgggtagacatgctgctgctacgccattcggtttctccggaaacggtatcgagggtgaaatgcgccagccgccgcagcggagagtcagtcagagaagtaatggcaatcaccgttgccccctgctttcgtgccgcttctgcgcacaagacaatctcttttttactgccgctgtaagagatagcgatttgtacatcgccttttttcaacgcctgagaaacggtggcttgtacgtgcgtgtcggcttcgcaggccacgcgatagccaattttcatcagtttgaagctcagatcgcgccccaccagcgcgcttccgcccaggcccgttatctggataaacggtgctttactgatgacctcaatgattttttgcagccgcgcgtaatcgagcaacgcgcaggtttgctccagcgccagctctttttcgcgattcagtttgcgcgcgatcacttccaggctatcatcactggtaatgctactgtgcaggtgcagtgccgtggcattcgttttctcccggctggcactgtattcgcctattaacgccatacgcaattcagtaaatccttgcgcgccgagtttttgggcaaatttcactatgctgctctggctaatgccgagctgtttcgccatctgccgactagaaacggattgcagctcactcacgttggcctgcagaaagtcagcgattttttgctcgttttcggtgaattcactccccgcattgcttattttcgtcaggtacaacatcttccactctcctgggctggcagcataaattccgcttaagttcttatgacgctcttcacactctgcgagtgtagactcaatgattcctttaagcctgtcaattcgggatatatgattccatacatctgcaattatttgatcgtaaatagtaaggtcaccaccgatgcaatttgaaaagatgattactgaaggcagcaacaccgccagcgctgaaattgaccgcgtaagcacgctggaaatgtgccggattatcaacgatgaagataaaaccgtaccgcttgccgttgagcgcgtactgccggatatcgccgcggcgatcgatgttatccacgcccaggtaagcggcggcgggcgtctgatttacctcggtgcgggaacatccggtcgtctggggattctggatgccagcgaatgtccgcccacctacggcgtgaaaccgggtctggtggttggtttgattgctggcggcgaatatgccattcagcacgcggtggaaggcgcggaagatagccgggaaggcggtgttaatgatctgaaaaatattaatttaacggcacaggatgtggtggttggcattgctgccagcggtcgcacgccgtatgtgattgccggactggaatacgcacgccagctcggctgccgcacagtgggaatttcctgtaatccggggagcgccgttagtaccaccgctgagtttgccattacaccgattgtaggtgccgaagttgttaccggttctagccggatgaaagcaggtacagcgcagaaactggtgctcaatatgctttccaccgggctgatgattaaatccggcaaagtgttcggcaacctgatggtcgatgtggtcgccaccaacgaaaaactgcatgtgcgacaggtcaatattgttaaaaacgccaccggatgtagcgcagagcaagcggaagcggcgttaattgcttgcgagcgcaactgtaaaacggccattgtgatggtgctgaaaaatctcgatgccgcagaagctaaaaaacgcctggatcaacacggcggctttattcgtcaggttttagacaaggaataacccatggccaaagagatcagcagtgaacttctgaacaccattcttacccgtgtcggcggaccgggaaatatcgccagttgtggtaactgtatgacgcgcctgcgtctgggtgtacatgacagtagtctggttgatcccaatatcaaaacgctggaaggcgtgaagggcgtcattttgaccagcgaccaggtgcaggtcgtttttgggcctggtaaagcgcatcgtgccgcaaaagcgatgagcgagctgctgggagaagcaccggtacaggatgccgcagaaatcgccgcccagaacaaacgtcagttaaaagccaaacaaacctccggcgtgcaacaatttctcgccaaattcgccaccatcttcacgccgctgatccccggttttattgccgccggtctgctgctggggatagcgacgttaattgccacggtgatgcacgttccggcagatgctcagggaacactacccgatgcgctgaattttatgaaggtgttcagcaaaggtttgttcactttcctggtgattctggtgggctataacgccgcccaggcatttggcggcacgggcgtaaatggcgcaattatcgccgcgctctttttgctcggttataaccccgcagcgaccaccggttactacgccggttttcacgatttctttggtctgcccatcgatccgcgcggcaatattatcggcgtgctgattgccgcgtgggcctgcgcccgcattgaaggcatggtgcgccgctttatgccggacgatctcgacatgctgctgaccagcttaatcaccctgctgatcaccgctacgcttgcgtacctgatcattatgccgctgggtggctggttattcgaaggtatgagttggctgtttatgcacctgaacagtaatccgttcggttgtgcggttttagccgggctgttcctgatcgccgtggtatttggcgtgcatcagggctttattcctgtttacctcgcgttaatggacagccagggattcaacagcttatttcccatccttagtatggcaggcgcgggccaggtgggcgcggcgctggcactctactggcgggcgcaaccgcacagtgcgctacgcagtcaggtacgcggggcgattattcccggcctgctgggcgttggtgaaccgctgatttacggtgtcaccctgccccgcatgaagccgtttgttaccgcctgtttaggcggcgcggcgggcggtttgtttatcggcctgatagcctggtggggtctgccgatgggcttaaacagcgcctttgggccgtctggtctggtagcgctgccgctgatgacttccgcacaaggcatccttccggccatggcggtttatgctggcgggattctggtggcatgggtttgcgggtttattttcaccacgctctttggctgccgtaacgtcaatctggactgatatcatgaaacggacaatgctctatctttctctgctggctgttagttgtagcgtcagcgccgcaaaataccctgttctgacagaaagcagcccagagaaagcagggtttaacgtcgaacggcttaaccagatggatcgctggattagccagcaagttgatgtcggttatcccagcgtaaacctgctgatcattaaagataatcagattgtgtatcgcaaagcctggggagcggcgaaaaagtacgatggcagcgtgttgatggaacagcctgtcaaagccaccaccgggacgctgtatgacctggccagtaacaccaaaatgtacgccacgaacttcgccctgcaaaagctgatgagcgaaggcaaactgcatcctgacgatcggattgcgaaatatattccggggtttgccgatagtccaaatgacaccattaaaggcaaaaacaccctgcggatttctgacctgctgcatcacagcggcggtttcccggcagatccgcaatacccgaataaagcggtcgcgggcgcgttatattcccaggataaaggccagacgctggagatgatcaagcgcacgccgctggaatatcagcccggcagcaaacatatctacagcgatgtcgattatatgctgcttggatttatcgtcgagagcgttaccggtcagccgcttgaccgctatgttgaagagagcatttatcgcccgctcggcctgacacatacggtatttaacccgctgctgaaaggctttaaaccgcaacaaattgccgccacggaattgaacggcaatacccgcgatggcgtgatccatttcccgaatatccgcacctccactctctggggtcaggtgcacgatgaaaaagccttttatagcatgggcggcgtttccgggcacgcaggtttgttttccaataccggcgatattgcggtgttaatgcaaacgatgctgaacggcgggggctatggtgatgtgcagctgttcaatgcggaaacggtgaagatgttcaccaccagctctaaggaagatgccacttttggcctcggctggcgcgtgaatggtaatgccaccatgacgccgacgtttggcacgctggcaagcccgcaaacctacggtcacactggctggaccggaacggtgaccgttatcgatccggtgaatcatatgacgattgtgatgttaagcaacaagccacatagcccggttgccgatccgcaaaagaatcccaatatgttcgaaagcggtcagttgccgattgcaacttatggttgggtagttgatcaggtgtatgcggcgttaaagcagaagtaataaaaaggccagtcagtaatgttactggctggtctgagagtgctgacaaacgcaaaactgcctgatgcgctacgcttatcaggcctacgtggagcccacaatatattgaattagcacgatttcgtaggccggataaggcgttcacgccgcatccggcgtgtacaacgcgcacttggtcaacaatctgaggccagtcagtaatgttactgcctggcctttaatcaatgaatcagaaacgcttacagcgccatcaacttgtccaggctcggtgcgaaataatagccgccggttaccggtttggtgaaacgcaacatcgcatcacgcttaccatcggtatcgccaaacatgctcagcagttgctgctcaatgttatgcagacgcgcgcagtaggcgcagaagtacagaccgtgagtgccactggcagtgccgtacggcaggctctggcgaacaatcttcagccctttgccatcttctttcagatcaacgcgggtgaggtgagaggtttccggacgttcgtcgccgtcgatctcttcgttggcctctttggtgcgcccgatcaccatctcctgatcgtgaacgctcatccggttgagctgcttcaggttgtgttcccaacgctggacaaacacatagctgccgcccgcatccacgccgtctttgataaccgccacttcgcgacgcgtctcttcacccgccgggttttccgtaccgtcaacaaagccgctcaggtcacgctcttcaacccaacggaagccgtggatctcttctttcacttcaatgcagtcaccaaaggcttccatcgccgcctgggcgacagagaagtttacgtcgtgacgcagagaaagaatgtggatcaacacatcgaactgggtcgtcggcgcaaggcctttaccgtagcccggaaaatctttcagctcttctgccccaacgccgccgctcagagcgcgccaggtgttgttaccaaaggcaaccaccgcaccaagatgcgcgtccgggaatttcgcttcaaaagttgccagtttgtcggcaaatgttttactggccgcacgcagggcgtcaacttcccctttcacgttggcttcgatccaaatcgccgcgcggcaatgttctggcaaaatgccactctgaacctgagacattgttcctcctgaaaataataatgccacgcaatccgtggcattgttgagcgctattttacgtgttttttcgcggcggcggtttgttcagacgcaaattaacgccgccagataattttactgactttccagtttttcagggtatcgtcgctaggcattaacccttcaggaccacgccattccccgctgaactggtagctaatatgttgactgccttcggctttacattcgacggcacgattatcatcaccatcagctttttggcaattgccaaatgctttgctgtaaaggtcgctaaacggtgtaccgattttaacaccggtgtcagcaggaatatcgctatccagcacgtcaatgcgactgatcgtgccttgatcgccgttaatcaccatcgccacgttgtcgcccttcatcacttcaaaaaagcgcaccacgttgccgttcgcggttttcattccgctgcgcaggcgataatcgccatcaagcgcatcggcaatggcttgttcttgcagtggtgtggacgccgttaattcacccacgccctgctcgctcactttggtggagctcccaaaccagttccacgggttagcggcagaccagttaacactgctcatcgtggaacagccggtcagcatcaatggcatagcgcataacattaaacgcaggcttttcatgtcacttcctttggttattcaataacgttgcttggagtgcaaattcaccaaaaagtgccgttattcttttacttcataaaaacaagcgcgtaaacgtcgattggtcagcagccagattaacgccacaatatccgccactaccagcgccagaccgataccgctaacggattcaccgttcagccacagccacggttgccagcaaagtaaaaccacctgcgccaacagcaacagaaaatagagtacacgccaggtgcgaggaaacgtagcccgccgaccgctcaacaaaaacgccagcaccgccggaatgccaggaatcagccccagccagaaattatcgtgatcgggataaaacagatttagcagcgcagtaccctgctcgcggctcgcaccggcaatgacaaacagcacccaggttcgcgcctgaagcaatagcacaagccagaagagcaagggtaaacgcaggcgaccgtgcgcatcataatggacaggatgaaactcagtactcttcatcttcaatcaaacgcttacccagactcagcacgtcggcgtgttcatatcccaggcgttcatacattccgagcaccatgtcgttatcttccggcacattgatctgaattttcgggcagccacgagcaatcagctttttctccagccgattaagcaacgcattggcaatcccacgcccacgaaactctggatgcacgccaagataataagcagacccgcgatgcccgtcataaccgcccatcaccgttccgaccacgtcaccgtttacctcagcgaccaaaaacaaactgacgtcatggttcatcttacgctcgatgtccatttccggatcgttccacggacgcagcaagtcgcaacgctcccaaagggtgatgacctcttcgaaatcttcctggcgaaatacgcgtatctccatggtattcgttacctttttgcgggttaaaaggctgattatggcgtgaacggtcgaattagccaatatctgacgaaaatcggttgaaaaagtggcataatggggagttgtcaactattgaaatgaaaagtaaaacaattctcaacagcaaaccgtcgtaacggattacgcgatacgatataacatctggaactttattattacaactcaggccgtatgagcacttttaaaccactaaaaacactcactagccgccgccaggtgctgaaagccggtttggctgccctgacgttgagtggaatgagccaagccatcgccaaagacgaacttttaaaaaccagcaacggacacagcaagccgaaagccaaaaaatctggcggcaaacgtgtcgttgttctcgatccaggtcacggcggaattgataccggagcgatcggacgcaacggtagcaaagaaaaacatgtggtgctggcgattgctaaaaacgtccgttccattttgcgtaatcatgggattgatgcgcgtttaacgcgttctggcgatacgtttatcccactttacgatcgcgttgaaatcgcccataaacatggcgcagatctgtttatgagtattcatgccgatggctttaccaacccgaaagctgccggtgctagcgtatttgccctctctaaccgtggggcaagtagcgcaatggcgaaatacctgtctgaacgcgaaaaccgcgccgatgaagttgccggtaaaaaggcgactgacaaggatcacctattgcaacaagtgctgtttgatctggtgcaaacagataccattaaaaatagtctgacgctcggcagccatattctgaagaagattaagccggtgcataaactgcacagccgcaacaccgaacaagcggcatttgtggtgttgaaaagtccgagcgttcctagcgtgctggtggaaaccagctttatcaccaacccggaagaagaacggctgttaggcacggcggcgtttcgtcagaaaatcgccacagcgattgctgaaggcgtgatcagttatttccactggttcgacaaccagaaagcacatagcaaaaagcgataagttatgaaacccgacgcacaccaggttaaacagtttctgctcaaccttcaggatacgatttgtcagcagctgaccgccgtcgatggcgcagaatttgtcgaagatagttggcagcgcgaagctggcggcggcgggcgtagtcgggtgttgcgtaatggtggtgttttcgaacaggcaggcgtcaactttagccatgtccacggtgaggcgatgcctgcttccgccaccgctcatcgcccggaacttgccgggcgcagtttcgaggcgatgggcgttagtctggtagtgcatccgcataacccgtatgttcccaccagccacgcgaatgtgcggttttttattgccgaaaaaccgggtgccgatcccgtctggtggtttggcggtggcttcgacttaaccccattctatggttttgaagaagatgctattcactggcatcgcaccgcccgtgacctgtgcctgccatttggcgaagacgtttatccccgttacaaaaagtggtgcgacgaatacttctacctcaaacatcgcaacgaacagcgcggtattggcgggctgttctttgatgacctgaacacgccagatttcgaccgctgttttgcctttatgcaggcggtaggcaaaggctacaccgacgcttatttaccaattgtcgagcgacggaaagcgatggcctacggcgagcgcgagcgcaatttccagttatatcgtcgcggtcgttatgtcgagttcaatctggtctgggatcgcggcacgctgtttggcctgcaaactggcgggcgcaccgagtctatcctgatgagtatgccgccactggtacgctgggaatatgattatcagccaaaagatggcagcccagaagcggcgttaagtgagtttattaaggtcagggattgggtgtaactccctcacccccactcccgcatccgctgatgcagcgtcagactcggcttctcggaaaacagctgctggtaatccgtggcaaattgccccagatgccagaatccccactgcatggcggcgtcttttaccgtcatactttggctccacggacttatcagttcgcggcgtacggcgttcaggcgaatgcgtttcagccacgcgttcgggccaatgcctaaaatagcgtgaaacgcgttttgtagcgtgcggcggctgacatgcagttgattacacaaatccagcaccgtcaccggttcggacatgttttccagcacatattcacgggcgcgggaaagcaatcgacggtaactctgatgactgatgctttccgccgtcaccattggttgcgcttcttccagcatggcccccatcgccattagcaaattatcccccagcacttttcgcactgcaggctgatggagattttccggattctcgcaaaacgtcgccagcgcctgttggacaaagccccacagcgcggctttatgctgctctttcacttccagcgcgctctggttacgcaacatatgtaatacccgatccgggttatgcaaaaagttagcctgccgggtgatgacatcttcagaaagcaccacgcccaggatcgtgtaatcatccggcgtgctcagttcaaattcagtgccaccagggcgggtggcgatttccgcgcttcccagacattggctaccgataaatccctgctcaccgcgcgtcgccggaatgccaaaccagaagctgttcggccagaccaggcagctctgacgcagcgccagaccggtgtattcacgaaaaacctgaatatcatcgagtagaatttccgtaaattcaccatgaaacttgcccggatgcagctgatcgtaaatctgctgccaggcggtaatcgttaaagcatgttcatagacatccgttgtctgtcgttgatgaacattatccacttcgaccttcggcgtgagcttcaggttttcgggtaagggttcatgataaagatggtgcaaattggctgtacgggtctttttcatgatgttaatgccgggtgttgtaggacacccggcacctccgacaggttaatggggcttgagacgataacgactactgcgtttacgtaacgtcccggcagaaaagagctgttcgagcgcatttctggctttttccagcggccagccaaagtgggcagccacttctcctgccgtcattccctgacgtacacttgttaacagcgccaacaactcgtcagcagattccgcgacgataactggcgcgtcgggttcccttacgggttgcttcggctggcggttaaagccagtaaccagccactgggtgtcatcgtctggccgaccgatctccttgcggctgatgacacgcccggtacgcatcgcggcagcacaacctgcgtccagcgccgcacgacacgccgccagatcgccttccaccaccagcgttaagcgaccagggtcaagcacttcgtgactgagcagacgaacgttagctgctttgagcatggcatccgctgcatctatcgcggcgaccatgccgtccacttccagcaatcccagtgcattgatcatcggcaacctccgttacgcacgctggattggattacgcgcgatttccagcactgcatcggtaaaggcgttacaggctgctttacacgctgcctggctaccggttaaaaatgctgcgctgtagttggtttcagacggtggcgggacataggtcgccagctgtacgtcggcagacttcagggctgcatcaatgccataggtcgcttccagcggcggtgccaccagatacgccatcggatcgccaagcgtgatcccggcggtactactgagataagaaccggtacggctaactacatgtgccaggaatgccgtatcttgcgcgtcattagcccactggaaagctgcgccattttcaatatgcgcaatcatcgcatccagacctgcacgcacttccgccgggtttggcccaccaagcataatcagcacttcaccggcagtcggactcgggccgtgtgcagcgcccgcatataggctgcggccatacaccacttccaccatcgcctgcttggtcgcttcatcagcggcaatgtaggtgacgtcatcggagtcggcagaaatcagaccgaggctacgaatatgcggcggcaatttcagttcacgcgcaaaatcggcgttaacggaggcaatcacccgcatagcggtgacagacggtcgaatcaaatctaaagctggcatgatgcctccttatcgggtcatgttgatgccggatgctttctgctccagcatacgtttcgccaaatccacaatgacggctgcggcttcaaccggcggcgtgccgccctggtgaatgttagagatacaggtgcgatcggcctcaacggtggtcgccatacgcgggctgtaaacggcgtagcaggagaggctttcactctgacccaaccccggacgttcgcccaccagcaggatcactactttcgcgccgaggatctcaccgatctgatcttcaatcttcacgcgaccataacgaacaaagaatggtgtaccgactttcagcccggcctgtttcaggcccgccatcagcggtggcaggatctcttcgtagttcacggtgatcgcatcagtactcaggccatcagaaataacgacctgtacgtccggattggcaacacactgcgctttcagcgcttcaacagcttctgcacacaggcggcggcccatatccgggcgagtcaggtagagatttttgtcgctaatttcagagcgtacttccagcaagccctgcgctttcacccactcttccggcacttctttcagtacggtatctttgctacgagagtgatcggccaggaaacgcagcagcgcctgcgtacgtggacgcggaccggcacgaccggtacaaacgcgggccacggtgctgcggcgcagttctgttaatacgtctgcgcgatgcggattttcaacaccaatccacgcttttgcttcagcggaacctaaatccagcgcacagctttcgctggtcaccggtgccgcacagttggtggtggcgcactttgcttcactcggcgcgggggccgcttgtcccatactcgccatcacgctgcgtacaatttcttcaatctgtttttgatccatgatatgttatctccgcgtcatcagaagaacagactcggatcgcccgcccgtttggtcaggcgaccgtttgccataatgcccatgctttccagccagcgttcaaactccggactcgggcgcaggttgagtaactgacgcacagtggcggtatcgtggaatgcggtggtctggtagttgagcatgatgtcatcacccagcggcatccccatgatgtagttgcagcctgcggtggcgagcaggatcatcaggttttcgttgaggttctggtcagcgtcagcgtggttggtataacagcagtcacagcccatagagatgccgctcagcttgcccataaagtgatcttctaagccagcacggataatctggcggtcgttgtagagatactccggcccaataaagccgaccacggtgttgacgataaacggatcgtaatgacgcgccagcccgtagttacgtgcttccatcgttacctggtctgcgccgaagttagcgccagcggatagcgcagagccttgtccggtttcgaagtagaggcagttttccccggcgatacggttgaactccgcgcccactgcgcgcgcttcgtcgagcatcgccagctccacgccaaactctttcagccctttttcgctgccacagatactctggaaaatcagcccgcccggtgcgccacgacggatcgcttcgatctgggtggtgacgtgcgccagtacacagccctgagttgggatgttgaatttgtcgatcacgccatagatggtatccaacacgcggcttaagttttccacgtcgtcagtcaccgggttaacgccgatcaccgcatcgcccaccccgaaggaaagcccttcgtagatttgcgcggcgatactttgcacgtcgtcacgggtgtcatttggctgcaaacgggcgctaaaggtgcccggaataccgatggtggtattggcctttttgattaccggcattttcttcgcgccgtagatcaggtccgcgttggagcaaatcttcgctaccgccgcgaccacttcgctggtcagccctttgcgggtaaaggcaatgtcgtccacgctggtttcatcgctcagcacatactcacgcagttcgctgatgctccagtttttaatctggttgtaggccgtttcgttaacatcgtcctgaatcagccgcgtcacgcagtcatcttcataggcaatcaccggattattgcggatgtccgctacggtcatttcgctcaacacctgctttgccgccacgcgctcctgactgcttgccgctgcgacgcccgccagcacatccccgctacgcagttcgttggctttagccagcacctcttttacatccttaaactgatatacattgccgaacaatgtggtctttagtttcataagtcgttccctcaggaaggaaatgcgagacttttcaccgtcaccggcacaacgcttccgccaaaaagaggcgtaccaatgtcgatatagtcccccgcgcggacaatcacttcgtcaatgactgccaacgggagttgttgtagctgtgggcgcaacaacatgcccagagctttaccaaagtcctgcccggccaccaccagcaggggatgcggattcggaaaacgcgcgacgaaatcgaccaacgcgttgatgaccgtcagtaccgcggcgtaacgcacaggcaggctggcgggaagcgccagcacgtacgcgtcagttttgggatcaagatccagctgaatcagcgcctgttgccaggcccccaccagatccgtttcatcaatcgggatcgccaccggcaaattgcgcagcggcagttgtacgccctcaagccagattgtgctgccagagaggctaagggtatgcgcgcccgcgccaatcaccgtggcgcgcacggtttgcgccggaaactgtacgttcatctcacgcaggcgcggatggtcatgcagcgcagttgccagcagcgggccaatatcggcaaaacagaacgggtcggcgggctggtggcgataacattcgcccacgccgccagaaagcgtaatgatttcgggcgtaacacctgcgggcagcaaaccggtttgcatcaatgcctgcgcgagcggactgagcgttccgtcaatcacttcgacaatcagttctgccatccgccgggtcacctgcaccagctgcgcgccggtcaggctacgggcgtcggtgcctgcaccgaagcactcatccacaatcatctgccccggtttatgagcgtaaaccacgcgcccgtggctgtcggtttccagcaggcgaccaccgacgttgaggcaggcagtgccgctgatttttccggcatcgaacagggcgtagttcgcggtgccaccgccgatgtcgatattcagtacccgacacagccgttgttcagaaagggtttgtgccccggctccgtgaccggcgatcacggattcgaggtgcggcccggcgctggcaacgacaaaatcgcccaggctctgagagagcgccatcaccgccgggcgagcattgcgggttttcgcgctttcaccggtgatgatgatggcaccagaatcaacgctttccggctcaatacccgcagcatgatattgctcgagtattaaggttttcagttccgcttcttttaaaccgccctgtttatcgacaggggtaaagaacaccggactttgccagctaatttcgcgtttaatgaattcgtagcgcggcacctggctcaccgccgcacggttaaccagctccagccgggagaaaatcacctgggtggtggtggtgccgatatcgataccgacgctcaatagctggcgagtgttcacgattgtgcctccgcttcggtttaagtcagctttgtgcctccgcttcggttttagtcgcggtcgcgtcttcttttggcaccagcatcatcgccacgccaatcgccgttacgccgccgatcaacttgccgacaatcatcgggaagatcatggcgttcatgttggcagcggcgaagcctaagtggtcgcccagggcgaaagcagcggaaacggcgaaggcgcagttgatgactttgccgcgggtatccatctgcttcatcatgccgaacatcgggatgttgttggcaagcgttgccaccatgccggctgccgcgatgttgttcatattcagtactttaccgacgctcatcagcggtttttcaaaccagcgagtcagcagcagcaccatcggatacgcccctaacagaacgcaggagatagaaccgataacttcaatggcgcgcatcacctcaccgggtttatcgccaggggccataaagataggatccagaccggggatcagttcccagccaagcaggaatttcactaccgcagcggcaagaccgagggtgatcaatgcaacgaggaatttggcgaagatctggaagccgttgatcattttttccgggatgaatttcagccccagcgccaccagaatcgcaacaatgatcaccgggatcatgttcatcaggatcagggcgaaagtgaattccaccggctggccgttgatctgcacaccggagtacatagcaaccagaccaccagcgatacaaccaatcggaatggtcacaatgcccgccagcacgccgagcgccagataacgacggtcagaaggttcgataatgccgagcgccaccggaatggaaaacacaatcgttggccccatcatgctcccgagaattaacccagagtatagccacgcggctacgtcgccgcccgccagctctttggcgaggaagaagccgcccatatcgcacgccagcagtgttccggcgaacatgcttgggttagcgccgagcatttcgtaaaccggaataattaccggcccgagaacgtgagccagtaccggtgccagcgcggtcataccgaccatcgccaggcccagtgcgcccattgccataaagccttcttcgaactgaccgccacttccttcgatacttttaccgaacttaccgaggaaacgagcagaaccgccgaactggctcaggatcctgtctacggcagctatcagcataaagaacatcatgatgtacatgatgatttcgttaattcccatcgcctttactccctgttagttgttatttattggcggatgcggcgtaaacgccttatccgccctacatgtgcaatcccgtaggctggataagacgcggcaagcgtcgcatccggcaattgcaccgcgccactggcggatgcggcgtgaacgccttatccgccctacatgtgcaatcccgtaggctggataagatgcggcaagcgtcgcatccggcatttattgcgccgctgcgtacaggccgacaatctgctccaggctggcggtacgcgggttactgcgcagacaaatatcttccagcgcggcctgcgcccatgcgccgtaatgcgcagatgtcgcaccaacatcgcccagtcgtttaccaatcccaacttccgcaatcagctcacttaccgcgttaatagcgtcacgatcgtcggattttttagttcgcagtgcccgaccaatctgactaaagcgttcacgacaaaccatccggttaaattccatcaccgttggcagcaacatggcgttcgcgagaccgtgcggaatatgcagcgccgcgcccggctgatgcgccatcgcgtggcacaacccaagacccgcactggaaaacgccattcccgccatacaactagccagcaacatgctctcgcgcgcggcaaggtcgtgaccgtagcccaccgctttcggcaggcttttgccaatcatcgcaatggcaccaatcgccagactgtcggtaaacggtgtagcgttcagggcgctgtatgcttcaatggcatgggttaacgcatcaatgccggtcatcgccgtgacatggctcggcacaccttcggtcaatgcggcgtcgaggatcgccacatccggcatcaggctggcatgggctaacacctgcttgcgcccgctcaccgcgtcgataatcaccgttacattggtggtttcagagccggttccggcggtagttggaatggcaatcagcggcaagcgcggttgcagaacgctggtttcactcatctctgccagcgtgctatccgggttcgtcaccagcaacgtcacggctttcgccgcatccagcacgctgccgccgccaaacgcgatcaccccatcacagccactctcacgcaactgcgccacggctgcacacacgtcggtaatgcacggttcgcccaccggacatggccagagcgtcatggcgatacctttaacggtcaggctacgcgtcagcccggcggtcatccctgcctgatgcaaaaagctgtctgccatcacgaacagatgtttcagcccacgcgtttgcgcttgctgtccgcaactgctcacgctgcccggaccgcaaagcgtcaccggtggaacgctaaatgtttttacccgttgcagattcagggtatcgaacgcctgaaagagcgcggtctgcaattcattttgcatatagcccctccgctttctctcgcccactactggcgatcgccagcggggtcataaacaaactgtgctgcggtaaatgcacctgtaacgccgggaattgtttgcgaaacagttccgccacgcccggttgcatacaagagccgcccgccagccataaatcagtaatgccctgcccttcaatatgccgggcgacaatgtccgccattttttcgtacaccggtttcaccgcaggccaaatctcttcaccgtgaccgcgcttgtactgctccgcctcttccaggctaatacggcgatttccggcgagagtcagagagatgtgatgtccgccggtggcttcatccgcgctgtacgtcaccttgccctttttcacgatggcaatgccggtagtgccgccgccgatatccactacaccggcgttgtccagttgcagcagatccgcaactgcggttggctcatccagcacatggctcacttccagtccggcagattccagcacgttgatggaaatacgcgggtccgtacctggaggaaaactagtcgccgcatggctaaaacgacgaccgaattgctgctcgagcgtgtcgagatggcgacgaacaatggtgacagcgccgaagaaatcccagacgatgccgtcgcgaaccacatcggcccagtcgaggcataccgccactggctgaccgtcgcggtcgacaaccatgctcaccacatcgcaggtgcccagatccacccccagccacagcggagattccgtcgcggcgggcgtctggttacacagcgttgccgccgtttgcagacgtggggtgagccattgttcgtcgtgcgccatctgttactccttaaacaatgcgaaacgcatcgactaatacacagcgacgcagacggacaaacgtacgcgcgctggttaccccttcaccggttggcgtggtgatggtcatggtggtccagccttccccgcccagccccagcccggcaatgcacggtccgttcttaacgaaaatgctggtatcaatagcattcgccatctggttcatgttttcgatgttgcggctgtgcattgccgccgtgtggtggcaaccgccttccagtttcaccgctagcgcaatggcatccgccacgttggcgacgcgcacgacgggcaacaccggcatcatcagttcagtcacggcaaacggatgttctgcggtggtttccacaaacagcaggcgcgtttcttgcggaactttaaggccgattgccgccgcgattttgcctgcgtcgcgaccaacccagtcacggctgacggtgccttttccgcgctcgtcgatatttttcagcaacaccggttgcagctgctgcgcctgttctgcggtcagtttcaccgcgtgctggccttccatcagacgcatcagttcatcggctacgctatcaacaacaatcagtaccttttcgtcggcacaaatgatgttgttatcgaaagaagcgcctttgacgatggactgagcggcacgggcgaggtcggcggtttcatccaccactaccggcgggttgccagcgcctgcggcaatcagacgtttattggtgtgtttacgcgccgcttctactaccgcttcgccgccggttaccaccagcaggccgatacccggaaacttgaacaagcgttgcgcggtttcgatatccggatttgccacagtaaccagtaagttttccggcccacctgcggcaacaatcgcctggttgagcagcgtaatcgcccgctgggagacttttttcgccgccggatgcggggcaaaaatgacgctgttgcccgcggcaatcaggctgatggcgttgttaattacggttgccgccgggttagtggaaggcgtcacgctagccaccacgccccagggtgcgttttcaattagggtcaggccgttgtcgccagtcagcacttgcggagagaggcactcaacgcctggtgtgccgcgcgcctgagcgacgttttttgcaaatttatcttcaacgcgccccatgccggtttcactgacggcaagttccgctaaatctctggcgtgtttttcgcctgcttcacgaatggcagcaatggctaactggcgcattgccacgctttttaacccttgctgggcgactttggctgccgcaacggcgtcatccagggacgcgaaaacgcccatctcatgaacggcggcggacggcgtgtcactgctttgcattttcagcagtaccgctttcaccacctgttcaatatcctgttgattcatgatgttctgccttatttgtggaaaattacctgaccgccagacaccacctcatcgacaatgccaatcacgcacagatcgaccggactcgtttcgcttttatgcgcctggcgggcggaactgccactcaccagtaacacccactccccggttcccgcgccaatattgtcgatggcgacggcgcattgcccgtcaggattaccttgtggatcaatcatttccaccatcagcaatttgtcatgcgccagtccgtgatggcgtacggtacaaacaatttgtccagtgacgactgccagtttcatacccgcctccgtggcgtatttcaggtaaaagctccccctaccctccgcagaaggtaaaatgaaaaaggagagagcgtgacgcccgaatcgacgtcacacagggtgattacaggttgctgctatcgcctttcaggccgatcgggaagacttcttccaggtcgccgtgcggacgcgggataacgtgtacagataccagctcgccgatacgctgtgccgctgcggcacctgcatcggtcgcggctttacaggctgcaacatcaccacgaaccatggcagtacacaggccgccgccaatctgcttaacaccaaccagcttgacgcgcgcagctttcaccatcgcgtcagaagcctcaatcagtgcaaccaggccccgggtttcgatcattcctaatgcttccattgtgctttcctctttatcagggtccagaacgggaccgttcattcaaccagtgtttgtaaactgctttcgcggttcacttctgtctgacgcggcacagctgccaccagcgccagctcgataatttcctgcacgctacaaccacgagagagatcgtgcatcggcgcggcaagtccttgtatcagtggcccgacggcacgatatccgccgagtcgttgtgcgattttgtaaccaatatttccggcttccaggctcggaaaaaccatcacattggccttgccctgtagcgggctggcaggcgctttttgcgccgccacttccggcacgaaggcggcgtcaaactgtaactcgccatccaccaccagctttggtgcgcgctcacggacgatttctgtcgcctgctggacgttagcaacacaggggtgacgggcgctaccattgctggaaaagctcagcatcgccacgcgcggctcttctccggtgatggcgcgccaggtttcggcactggcaagcgcgatatccgccagctgcgccgccgtcggctgtggcaccacgctgcaatcggcaaagcccaacgccgggccgctgtactgtggcaacatcaggaaaatggaagagagcgttttacagcctggctgcaagccgataatgcgtaatccggcacgcagcacatttgccgtggaagagaggttgcccgcgatacagacatccgctttaccggcgctgaccattgctgcggcgaacatcagagggtcggtaagtttttccagcgcatccggcggcgttttttcgcccgcgcgggccagccagcgatgagcaaattcttcccgcattgcgaggttgccatgcggatcaatcacctgtagcccgtccatcgccacgccgtgactgagcgcaaactgacgaagttcaaacggattggcgaccagaatgggcgttgccagaccttgttgatgtaaatattgcgcggctttcagcacacgttggtctaacgcatccggaaaaaccactctggcgggcgctcgcaacgccagttcacgacaacgttcaataatcattgcgtttcccccagtcgttgttggatctgcttcaccgttagcggctgcttcgttacgctcaggatcatcatcacgtagaccgtgctgctaaggcggttcagcgcctgcaaaatgtccgggcgtaatacttcaaagctgcgggtgataaagacctgcgccgctacggtttcggtttcccgcactttggtgcgtagcagattgagcaacgcagcatcgcgcccgtggctggcttccggcaccagatgatcgtggtcgagatagcgcagcggctgatgagaaagccgatgcagatcttcgtcagaaagcccgacaatcgcctggcagcccagcggttcccccagcgcatcggcgcgcataatgttgccaagacggctacggatatccgccagccacggctgccacggttccgccagttcaatttgcagccacactgccagcgcaatggtgctgtcgagaaccgcgcgaaaacccagacgcggatcgcttttggcgaccattttttccgcgctcaggtgagtcagcgtatccggcttttttgccaccggctggcgacacagttcgcagcacgcctgcggatgttcatcgctactggtcagcccatgaacgggctgcggctgctgctgttcatcgtcaacaaacaggcggccctgctcgtcaataaacttgatgcgcagatggcggctttccagcaactcccgggcagagggcgtcaggcgactgtccgcagggagatggatctctgcgccttcgctgagcgtatggttcgctcttagccatgcttcggtgatgaaatctttcatagggattgccagttagccggccaggcgacatacaggaatttcacgctggatgtcgtaccaaattcgatgctggagcctttcgggataaacatcacgtcgcctgctttggcgatcatggtttggccttcgtggcgaacatgcagctccccttccagcaccatgtcgatttcgtcgtagttcagggtccacgggaagaatgcgttctcccactgcataaaaccggcggccatgctgctgccgtcgtctccggtcacaagatcagtcaagcccacgcaatgcggctctgcgccgtcgaaacgaccaaacttgacgctactgccatcaatcactttgatgccgcctttgccggtcacgcttttgaagctcggctgcattgcgccctgctccaggctctgtttttccttcatcactttttccatcagctgtgcgaccaggctttcggtaaactggccttccggcagctgggcaatgatggtttcgcggatgcgctggctttcggttttgtcggctggcacgctggcgggcacggacgccgttaccgggatgctttcatcacattcggtgatggtaaaacccagtagatccgccacttcacgggcttccggggtaataatgctggcgcgcagaaccacggacattgcctgttcgccgcgcgcgtgtgcttcacgaatatcattcgctgtgatgagttttttcacctgcttcctcctgtttggtgagagatgccagataatccaccagttgctgcacgctttgcgggtcgtggctgtttagctcgaacatcggctcttcgaaacccgtctcaagcaataactttcgcgttgcggcgacgtcagcatctggcatgtccgttttactgatgacggcgatttgccgtttgctgacgccaatatccagcaacccggcaggcaaccgactttccgggtcatttgcgccatggacatagatcagcatgtctacatcctgtagcgtggtaattaaggcgtgataccagcggggatggttaaaatattcacccggcgtatcaatatcgcccttatcattaaattccacggcctgtgtttttctggcgagggtataattcccctgcaacgcattaaataacgttgtttttcctgccccgacgctacccacaaacgcaattcgtttcatgaatgcctcgtattaacttttggtcatttcacaaagcgtataatttaataagcgacctaaaccgctgacggtttgacttaacgcttcttctactgcgcccacgctgccataaatcaccaatgcaccgctgaatcggtcgagaaaaccgatatgcacatcagcggctttcagcgctaaatcaccggcgatcatcgccgtttcgccgggagttagcgtcataatgccaattgcgcccgcatccggaacgccgattttcttcgccagttcctcaccgggatgcgcgatgagatgcgccagtgtgacctgtttgccgggcacaaattcctgaatgatgcgttctttatccatgagtcgccgcctgtgaaaaactttcgtgtatcgtgacaatttttcgtcagagtaaataacaaaattcggcaagcgcgtttaaaaggtgaggtagatcactaagaatggagagatattcgctgtggtgcataaactttcatatgcaacgcatgaatataaataaaataatatcgagatattatatagactgcttttttttattattcgcaaactcagtaataagctttactaatatattgcagctaaactgcttaccctgaatattcagggtaagcgtgagagttaaaaaaaattacagcggttgggtttgcgcttctaccacggccagcgccaccatgttgacgatacgacgcacgcttgcgatcggcgttaacacgtgaaccggtttcgccacacccatcagcaccgggccgacagtcacaccttcgctgctggaaacacgcagtaagttgtaactaatgcgggcagcttccatgttcggcatcaccagaatattggcggaacctttcaaagagctgtccggcatacggtcgttgcgaatcgcttccaccagcgctgcatcgccgtgcatttcaccatcaatcatcagttctggtgcacgttccctgaccagttccagcgcctgacgcattttgctgctgctcgggcagtcagaagaaccaaagttggagtggctcaacaaagcaacgcgcggctcaataccaaaacgacggacagtttctgccgccatcaaggtgatctccgccagctcttctgcatccggttcatcattaacatatgtatcggcaataaaggtgttaccactcggcagcagcagcgcgttcatggcacctgcggtgtgaacgccatcgcgataaccaaagacatttttcaccacgctaaaatgttcatgataatcacccaccgtaccgcaaatcattgcatcggcttccccacgctgaaccatgatcgcgccgatcactgtcgggttactgatcagcgcccgctgcgcctgttcctgagtgacgccgcgacgcttcatgatctggaagtattcggtccagtactctttaaagcgcggatcggattcgttattgacgatctcaaaatcaacgcccgctttgatctgcaagcccagtttctgaatgcgcatttcgatcacgttcggacgaccgataaggatcggtttcgccagtcccagcgttaccagttcctgagtggcatgcagaacgcgcgcctcttccccttccggcagaacaacgcgcttcggcgctttgcgagcctgggagaaaatcggcttcataaacaggttggttttgtaaacgaactcagtcagcttgtcgatgtagacgtcgaaatcagcaatcggacgagtcgccacgccgctctccatcgcggctttagcgaccgcaggagcgatcttaacgatcaagcgcggatcaaacggctttggaatgatgtattccggaccaaagctcagatcctgatcgccatacgcactagccaccacttcgctctgttccgcatgggcgagttctgcaatcgcacgtaccgccgccagtttcatctcttcgttgatggcggttgcgccaacgtccagcgcgccacggaagatgaacgggaagcacaggacgttgttcacctggttcggatagtcagaacgaccggtgcaaatgatggcatccggacgcacttctttcgccagcggcggcagaatttccggttccgggttcgccagcgccaggatcattggcgcacgagccattttcttcaccatttcctgggtcagcactttcgggccggaacagcccaggaaaatatccgcgccttcaatcacatcatcgagggtacgtttgccgtcatccaccaccgcatatgcggctttggtttccgccatgtttggctcacggccctgatagataacgcctttactatcgcaaaccacgatgttatgtttttgcagacccagcgctaccagcaggttcatacaggcgattgctgcggcacccgcgccggaaaccaccatccgcacgtcggagatgtttttctccaccacgcgcaagccgttgaggatggcggcagtgctgataattgccgtgccgtgctgatcgtcgtggaataccggaatattcatccgctcgcgcagtttctgttcaatatagaaacattctggcgctttaatgtcttcgaggttgatgccgccgaaggttggttcgagcgcggcgacaacttcaataaatttgtccgggtcgagttcgtcaacttcaatgtcaaatacatcaatcccggcgaatttcttaaacagaacgcccttgccttccatcaccggtttgcctgccagcgcgccaatgttgcctaaccccagcaccgccgtaccgttagagatcaccgccaccaggttacctcgggcggtatatttgtaggcttttaacgggtctttttcgatttcaagacaaggtgcggcaacgcctggactgtaggccagcgccagatcgcgctgtgttgccagaggcttggttggagaaacctggattttccctggaactggaaattcatggaaatcaagtgcactttgttttaactggtcatccatttggttgttcctttcacgtaacgttcacaaataaagtgtgtgggcaacagcccctgcccacaacgtggcgcacattattaccctgccggagtctacagactttgagcaagtccaaactctcaccattaatataatgttttggtaataatcctataacactgatgttacctgcttaatccagcaataccatgcctgtctgctatgcttttttgatgcgtttagcgaaatttctcagaagtgtgaattaacgcactcatctaacactttacttttcaaggagtatttcctatgaacgagttagacggcatcaaacagttcaccactgtcgtggcagacagcggcgatattgagtccattcgccattatcatccccaggatgccaccaccaatcctagcctgttactcaaagctgccggattaagtcaatatgagcatttaatagacgatgctatcgcctggggtaaaaaaaatggcaagacccaggaacaacaggtggtcgcagcgtgtgacaaactggcggtcaatttcggtgctgaaatcctcaaaatcgtacccggtcgcgtgagtacagaagttgatgcacgcctctcttttgataaagaaaagagtattgagaaggcgcgccatctggtggacttgtatcagcaacaaggcgttgagaaaagtcgcattctgatcaagctggctagcacctgggaaggaattcgcgcggcagaagagctggaaaaagaaggtattaactgcaacctgacgctgctgttttcttttgcacaggcacgggcctgtgcggaagcaggcgtttttctgattagcccgtttgtcgggcgtatttatgactggtatcaggcacgcaagccgatggacccgtatgtggtggaagaagatccgggcgttaaaagcgtgcgcaatatctacgactactataagcaacaccactatgaaaccattgtgatgggcgcgagcttccgtcgcaccgaacaaatcctcgccttaaccggctgcgatcgactgactatcgcaccgaatttactgaaggagctgcaggaaaaagttagcccagtggtacgtaaattaatcccaccttctcagacgttcccacgcccagctcccatgagcgaagcggagttccgttgggagcacaatcaggatgcgatggcggtagaaaaactgtctgaaggcattcgtctgttcgccgttgatcaacgcaaactggaagatcttcttgccgccaaactataaaccagccacggagtgttatatgtcccgaaaagaccttgccaatgcgattcgcgcactcagtatggatgcggtacaaaaagccaactctggtcatcccggcgcgccgatgggcatggctgatattgccgaagtgctgtggaacgattttcttaaacataaccctaccgacccaacctggtatgatcgcgaccgctttattctttccaacggtcacgcgagcatgctgctctacagtttgctacatctgaccggttacgacctgccgctggaagaactgaagaacttccgtcagttgcatagcaaaaccccaggccacccggagattggctatacgccaggcgttgaaaccaccaccggcccgcttggacaaggtttggcgaacgccgtcgggctggcgatagcagagcgtacactggcggcgcagtttaaccagccagaccatgagatcgtcgatcacttcacctatgtgtttatgggcgacggctgcctgatggaaggtatttcccacgaagtctgtagcctggcaggcacgctgggactgggcaagctgattggtttttacgatcacaacggtatttccatcgacggtgaaacagaaggctggtttaccgacgatacggcaaaacgttttgaagcctatcactggcatgtgatccatgaaatcgacggtcacgatccgcaggcggtgaaggaagcgatccttgaagcgcaaagcgtgaaagataagccgagcctgattatctgccgtacggtgattggctttggtagcccgaataaagcaggtaaggaagaggcgcacggcgcaccactgggggaagaagaagtggcgctggcacggcaaaaactgggctggcaccatccgccatttgagatccctaaagagatttatcacgcctgggatgcccgtgaaaaaggcgaaaaagcgcagcagagctggaatgagaagtttgccgcctataaaaaggctcatccgcaactggcagaagagtttacccgacggatgagcggtggtttaccgaaggactgggagaaaacgactcagaaatatatcaatgagttacaggcaaatccggcgaaaatcgctacccgtaaggctagccaaaatacgcttaacgcttacgggccgatgctgcctgagttgctcggcggtagcgcggatctggctcccagcaacctgaccatctggaaaggttctgttagcctgaaggaagatccagcgggcaactacattcactacggggtgcgtgaatttggcatgaccgctatcgccaacggcatcgcgcaccacggcggctttgtgccgtataccgcgacgttcctgatgtttgttgaatacgcccgtaacgccgcgcggatggcggcactgatgaaagcgcggcagattatggtttatacccacgacagtattggcctgggcgaagatggtccgacgcaccaggctgttgagcaactggccagcctgcgcttaacgccaaatttcagcacctggcgaccgtgcgatcaggtggaagcggcggtgggctggaagctggcggttgagcgccacaacggaccgacggcactgatcctcagtaggcagaatctggcccaggtggaacgtacgccggatcaggttaaagagattgctcgtggcggttatgtgctgaaagacagcggcggtaagccagatattattctgattgccaccggtagtgagatggaaattaccctgcaagcggcagagaaattagcaggagaaggtcgcaatgtacgcgtagtttccctgcccagcaccgatattttcgacgcccaggatgaggaatatcgggagagcgtgttgccttctaacgttgcggctcgcgtggcggtggaagcaggtattgccgattactggtacaagtatgttggtctgaaaggggcaattgtcgggatgacgggttacggggaatctgctccggcggataagctgttcccgttctttggctttaccgccgagaatattgtggcaaaagcgcataaggtgctgggagtgaaaggtgcctgatggtgattgccggatgctgattgccggatgcgacgctgacgcgtcttatccggcctacagcgtcttatccggcctacatgtcccgccattttgtttaacgggtgatccacaacgtgggccaggcgtctggcccatgccagttatcgcaggtgggttctgcggcgtaacgcaccaggcgaaaacgctgaccgtcaaagcgccagcgcgcctgaatgccacaatcgcttaatccgcgccctttcgctaaggtcaccagttcacggcttttctcatcaaatgttgcgttcatcagttccagttcattcgtctcctgaccgttgttgaacggcaaacgcaaccgaaccgggcggctagctagtggctttttacggctcacaatccatgccaaatcaatggtgttataggcccctgcctcacagctaatcatcatcagcgctttatcatcagtcagcgcagtgacattcacctcacgacgcaatggatcaaggctgcagcgcagaccattcatccgccagtttccataatccagcaaatcgttgcgttcttcgagactgagtggcgtcggcgttgggttaaccaccgcgacctctttcagcgcaggcgcgggcggtacgctgagcggcggttcgtcccctttcttgatccacgcggtttcactgccaacgcgcttttgctgagcatcaataaacaacaacgctgcttttaagccactcagagaaatggtctgatcgccatcgcgtaaggtgattgccttcccttcctgaatcatctgcaaaaacgcggtgatggttgccgtatcatcggttactaataaccatggactaatccgccacttgtcaccacttaacgccaacggctcgccatctaacagcagccgtggcgctatctccccttcactcgcctccgggctcttcaatccgccgcgctcaatacgtaaaacggcatcggtatgcgccccggcgctgcggctcagggtcatcaccagtccattatgatcgcccgtattacgcgccacgcagaaattttggttattacaggtgacctgccagtcggaaaacgcccgttgcgctggtgccgcccacaccaaagacgtcggcaacaaagcgaaaaaaaagagaaggaaaatgcgatagcgcatggacggtacgaccccagaagttcaaacaaacagcacaagtcgtatcttcgttgcgcaggtagcgcggctcaatcggatttgtcggattgagccaataataaacaacgaaatattattgttatttttcagtccattaaatgactcgtttgcaaatagttaagcaataacaccgtcttaccgtcacgtatctcgccggttttgatcatctccagcgcctggctgaacggcagctcgagcacttcaatatcttcatcttcgacaccgccaccggcgttagcgcgctgattgtcactgtattcggcgataaaaaagtggattagctcagtcacaccgcctgggctcatatacagttcaaataatttgcgcacttcacccacttcatagcccgtctcttcaatcgcttctttgcgaatacacacttccggttcgtcgttatccagcagcccggcgcagctttcaatcagctgcccgctttcattgccattaacccaggtagcgacacggaactgacgaatcagaaccacggtctttttcttcgtgttgtacaggaggatcgtcgcaccattgccgcgatcgtacacttcacgtttatggcggataacttcgccgtctttgcgcgtgagatcgtaagtaatgttgtgcagggtgaaatagttatcggagagaattttgtctttaatgagggtgatttgttgcgtcataccgactccacagcgcgaaatgaacaattatcttacgctgtgaagtcgggtttgtctgcgcaggctatcagtgagatttgacactttttacccccagccagtcaataatcccctgtgccgcatgacgtccttctgccattgcggtaaccaccagatccgcaccacgcacggcgtcaccaccagcgaagattttcggattggtggtctggtaacggtactggctttccacatccgcgatgatgcggccccatttgtctaccgttacaccgtggctctccagccacggcatcccgtgcggattgaagccaaacgccataatcaccgcgtcggctggcatgacaaattcactgccttccaccggcactggacgccgacgcccctgggcatccggctctccaagacgcgtgcgcaggaaacgaatcccgcagacgtgaccttgttcattcagctcaagcgccaccggctggacgttaaattcgaagttggccccctcttcgcgggcgttcttcacttctttcttgctgcctggcatgttagcttcatcacgacgataagcgcaggtgacgttactcgcgccgtggcgcagtgcggtacgcacacagtccatcgcggtgtcgccgccgcccagtaccacgacgttaagtccggcggtattgataaacggctcttccggtagctcttcgagccccatcacctgtttagtgttggcaatgaggaacggcagcgcgtcataaacgcccggcgcatcttcattgggtaaacccgctttcatggaacggtaagtgcctacgccaacgaagaccgcgtcgtattgttccaaaaggctatccaaagagacatctttacccacttcacaattgagttcgaagtgaatccccatcgcgctgaagatttcccgacggcgtgccagcagggatttatccagtttgaaagaaggaatgccgaaagtgagcaagccaccgatttctggatggcgatcgtacaccgtcacccccacgccattgcgggtcagaacatccgcacaggccagccctgccggacctgcaccgataatcgccacccgcttgtccactttggtgacatggcttaagtcaggacgccaacctttcgccaacgcctgatcactaatgtagcgttcaatgttgccgatagttaccgcgccgtgctcatcgcgaatagtacaggcaccttcacacaaacggtcttgcggacaaacgcgtccggtaatttccggcagggtgttggtctggtgagaaagctcgacggcggcgtcgatgtttccggctttcaccagttcaatccactgcggtatatggttatgcagcgggcaggtccattcacaaacgctgtgctcgccgcacttaaggcagcggctggcttcccgttgtgcctggtcggcgcgaaatggcagataaatttcatcaaaaccggttttgcgcgcttcaatcgccagtttatccgactcgccacgcgcgggcgttgcctgcatttgttcgactttactcattaccggcatttcttgcgccgcggtactggcatgccacggttgatgttcctgacgcgcggtgcgcaagcggcgggatttcgccatgccggagagtgcgacgtcagtgaccagttgcagcgcgtccgccgggcaattctcaacacaggcaggaccgttttcgcgccccgcacaaaggtcgcatttatgcgccgtggcttttacttttcctgccgcgacgggtgtcaggacgatttgcatcgtaccaaaaggacaggccaccacgcaggatttacagccaatacacttttgctgattgacctgaatgctgtcatcaacgtggctgattgcgccattagggcagctacgggcgcagggcgcatcttcacaatggtgacaggtcactgcactacgttgctgttgatgtttgataaccgtaattcggggatgaaaatggtgttggctcaggacatgttgctcatcattgtgagccatgacacaggcgatttcacaagcatgacaacccagacattgctgactgttggccataataaaacgattcataacgaccttcttttttggttgtaaaaaccttattctttatatgagtgttgttattacccgacttacaggggaatcggcaatgttcatgtgcccagaataagtaactatttcgctataaactgtggcagatcaaataatcccatcactgactaaattgcgtttcagcgaactggaacattaatgattttttgtggagaagacgcgtgtgattgttaaacgacccgtcagcgccagtctggcccgggcctttttttacattgtgctgctgagcattctttccacgggtatcgctctgctaactctggcgagcagtttgcgcgacgctgaggctatcaatattgccggaagcctgcgtatgcagagttaccgcctgggctacgacttgcaaagtggcagtccacaactcaatgcacatcgccagttatttcagcaggcactgcatagtccggtattaaccaacctcaacgtctggtatgtgccagaagcagtaaaaactcgctatgcgcatctgaatgccaactggctggagatgaataatcggctcagcaagggcgatttgccgtggtatcaggccaatattaataattatgttaatcagatagacctgttcgtactggctttacagcactacgctgaacgcaaaatgctgctggtggtggcgatttccctggctggcggcatcggtattttcacgctggtcttttttactttgcgccgcatacgccatcaggtggttgccccgctgaatcagctggttaccgccagtcagcgtattgaacacgggcagttcgacagcccgccgctggataccaacctgccgaatgagcttggtctgcttgcaaaaacctttaaccagatgagcagcgagctgcataaattgtaccgtagcctggaagcgagtgtagaagaaaagacccgcgatctccacgaggccaagcgtcgtctggaggtgttgtatcagtgtagccaggcgctgaacactagccagattgatgtgcattgtttccgccatattttgcagattgttcgcgacaatgaagcggctgaatatctggagttaaatgtcggtgaaaactggcggattagcgaagggcaaccaaacccggaattgccgatgcagattttaccggtgacaatgcaagagacggtttacggcgaactgcactggcaaaatagtcacgttagtagtagtgaaccgctgcttaacagcgttagcagcatgctgggacgcggtttgtactttaatcaggcgcagaagcattttcagcaattattgttgatggaagaacgtgcgaccatcgcccgcgaattgcacgacagcctggctcaggtactttcttacttacgtatccagttgacgttactgaagcgtagcataccggaagataacgccaccgcacaaagtatcatggccgatttttcccaggcgttgaatgatgcttatcggcagttacgcgagctgttgactactttccgcctgacgctgcagcaggcggatctcccctccgcattgagggaaatgctggatacgttacaaaatcaaaccagcgccaaactgaccctcgactgccgtctgccaaccctggcactggatgcgcaaatgcaggtgcatttgttgcaaattattcgcgaagcggtgctgaatgcgatgaagcacgccaacgccagcgaaatcgccgtcagttgcgtcaccgcgccggacggcaatcacacggtttatatccgtgataacgggattggtatcggtgaaccgaaagaacccgaaggtcattatggtctgaatatcatgcgcgaacgcgcggaacggctaggtgggacgctgacttttagtcaaccttccggcggcggcacgttagtgagtattagctttcgctctgcggagggtgaggaaagtcagttaatgtaatgcctcctactgaccaaagaatacttgcacttaaggttcagtataaaagggcatgataatttacattaactcctttttttctccacgattggctcgtaccttgccgctacagtgaagcaagtcaagcctacaacgatacgcagaaacacgaggtcctcttttaatggcgaatttctttattgatcgccccatttttgcctgggtgctggcaatcctgttgtgtctgacaggtaccctggcgatttttagtttgcccgttgaacaataccccgatctcgcgccaccgaatgtgcgagtgaccgctaactatcccggcgcaagcgcccagacgctggaaaacaccgtgacccaggttatcgagcaaaatatgaccggcctcgataatctcatgtatatgagttctcagagcagtggcaccggtcaggcatctgtcactttaagttttaaagcaggcaccgatccggacgaagccgtgcagcaagtacaaaaccagctgcaaagtgccatgcgaaagttaccgcaggcggtgcaaaatcagggcgtgacggtgcgtaaaaccggcgataccaacattctgaccattgccttcgtctctaccgatggtagcatggataaacaggatattgctgattatgttgccagtaatattcaggacccgttaagccgcgtgaatggcgtcggggatatcgatgcctatggtagccaatattccatgcgtatctggctggacccggcgaaactcaacagtttccagatgacggctaaagatgtcactgatgccattgagagtcagaacgcgcagattgcggttgggcaacttggtggtacaccttccgtcgataagcaggcgctcaacgccaccattaacgcccagagtctgctgcaaacaccagaacagttccgcgatatcaccttgcgggtcaatcaggacggcagtgaggtaaggctgggcgatgtcgccaccgtcgaaatgggggcggagaaatacgattatcttagccgcttcaatggtaagccagcctccgggctgggggtaaaactggcctccggcgctaacgaaatggcgacagcggagctggtgctcaatcgtctcgacgagctggcgcagtatttcccgcatggactggaatacaaggtggcgtatgaaaccaccagctttgttaaagcctccattgaagacgtggtgaaaacgctgctggaagctatcgctctggttttcctcgttatgtatctgttcctgcaaaacttccgcgccacgctgatacccactatcgccgtgccggtggtgttgatgggaaccttctccgtactttacgccttcggttacagcgtcaacaccttaaccatgttcgcgatggtgctggcgatcggtctgctggtggatgacgccatcgtggtggtggaaaacgtcgaacgtattatgagtgaggaaggactcactcctcgcgaagccacacgtaaaagcatggggcagatccagggggcactggtcgggattgcgatggttcttagcgcggtatttgtaccaatggccttcttcggcggcaccaccggtgccatctatcgccagttctctattaccattgttgcggcgatggtgctgagtgtactggtagcgatgatcctcactccggctctgtgtgccacactacttaagccactgaaaaaaggtgagcatcatgggcaaaaaggcttttttgcctggtttaaccagatgtttaaccgcaacgccgaacgctacgaaaaaggggtggcgaaaattctccaccgtagcctgcgctggattgtgatttatgtcctgctgcttggcggcatggtgttcctgttcctgcgtttgccgacgagcttcttaccgctggaagaccgtggcatgtttactaccagcgtacagttgcccagcggtagtacgcaacaacagaccctgaaagtcgttgagcaaatcgagaaatactacttcacccatgaaaaagacaacatcatgagcgtgtttgccaccgttggttctggccctgggggtaacgggcaaaacgtggcgcgaatgtttatccgcctgaaagactggagcgaacgcgacagtaagaccggcaccagctttgccattatcgagcgtgcaacgaaggcgtttaaccaaattaaagaagctcgcgttatcgccagcagcccgccagcaattagcggtcttggtagttctgcaggttttgatatggagttgcaggaccacgctggagcgggtcacgatgcgctgatggcagcacgtaatcagttgctggcgctggcggcggaaaacccggagctaacccgtgtgcgccataacggcctcgacgacagtccgcagttgcagattgatatcgaccagcgtaaagctcaggcgctgggcgttgctatcgacgatattaacgacacactgcaaaccgcctggggtagcagctatgtgaatgactttatggatcgcggtcgcgtgaagaaagtctatgtgcaggcagctgcgccgtatcgcatgctgccagatgacatcaatctctggtatgtccgaaataaagatggcggcatggtgcccttctctgctttcgcgaccagtcgctgggaaacaggcagcccgcgtctggaacgctataacggttattctgcggttgagattgttggggaagccgcaccgggggtcagtaccggtacggcgatggatattatggaaagcttagtgaagcagctgccaaacggctttggtctggagtggacggcgatgagctatcaggagcggctttccggcgcgcaggctccggcgctgtacgccatttccttgctggtggtattcctgtgtctggctgcgttgtatgaaagctggagcgtgccgttcagcgtaatgctggtcgtgccgctgggggtaatcggcgcgctgctggcaacctggatgcgcgggctggaaaacgacgtttacttccaggtgggcctgttaacggtcattggtttaagcgcgaaaaacgccatcctgatcgtcgagtttgctaacgagatgaaccaaaaaggccacgacctgtttgaagcgacgctccacgcctgccgtcagcgtttacgcccgattctgatgaccagcctggcatttatcttcggcgtattgccaatggcaaccagcacgggtgccggttccggtggtcagcatgcggtgggtactggcgtaatgggcgggatgattagcgccactattctggctatttacttcgtgccgctgttctttgtgctggtgcgccgccgcttcccgctgaagccgcgcccggaataagcaataaaaaaggcgacatgccaatgtgtcgcctttttcaactttccgattaagaacctgctcagcgggttcttgctgtttgtactttgtctcaggaattacttacgaagcataacttcgataaagtctttccagttccccagttcacgttcaatcataacaacctctcttataattatgggtattctacggaaacaatataccgtggtgaagctaatttactcgattgctgcgatgactacctccgggggacaaatcttatgtaaatactatggtcctgcggtgatgatttgtatgtgatacacagcaacatttcgagatattcatacggcatctaatactgatttaattctggttaaaatacagacagataacaagatgaatattcttaatgtttacgttaaaaatgtttaatattatttaatagttgttaatttgaatacttcgataatgttatatttcctgataatcatttgcaggcaaaatgttttcacccttaaatgagtatttattctcataaatcgaaaaaggattcattatggttacactttacggtatcaaaaattgtgacaccattaaaaaggctcgccgttggctggaagccaataacatcgactatcgttttcatgattaccgcgtcgatgggctggacagcgaattattgaacgattttatcaacgaattaggctgggaagcgttactcaacacccgtggtacaacctggcgtaaactggacgaaaccacccgcaataaaatcaccgatgcggcctctgcggcggcattaatgactgaaatgcctgcaattatcaaacgtccattgctctgcgtgcccggtaagcctatgctgctgggtttcagtgattccagttatcagcaatttttccatgaggtgtaatctatgagctgcccggttattgagctgacacaacagcttattcgccgcccttccctgagtcctgatgatgcaggatgccaggctttgttgattgaacgtttgcaggcgatcggttttaccgttgaacgcatggactttgccgatacgcagaatttttgggcatggcgtgggcagggtgaaacgttagcctttgccgggcataccgacgtggtgccgcctggcgacgccgatcgttggatcaatcccccgtttgaacccaccattcgtgacggcatgttattcgggcgcggtgcggcagatatgaaaggcagcctggcggcgatggtggtggcggcagaacgttttgtcgcacaacatcccaaccatacggggcgactggcatttctgatcacctctgatgaagaagccagtgcccacaacggtacggtaaaagtcgtcgaagcgttaatggcacgtaatgagcgtctcgattactgcctggttggcgaaccgagcagtatcgaagtggtaggtgatgtggtgaaaaatggtcgtcgcggaagtttaacctgcaaccttaccattcatggcgttcaggggcatgttgcctacccacatctggctgacaatccggtacatcgcgcagcacctttccttaatgaattagtggctattgagtgggatcagggcaatgaattcttcccggcgaccagtatgcagattgccaatattcaggcgggaacgggcagtaacaacgttattccgggtgaactgtttgtgcagtttaacttccgcttcagcaccgaactgactgatgagatgatcaaagcgcaggtgcttgccctgcttgaaaaacatcaactgcgctatacggtggattggtggctttccgggcagccatttttgaccgcgcgcggtaaactggtggatgcggtcgttaacgcggttgagcactataatgaaattaaaccgcagctactgaccacaggcggaacgtccgacgggcgctttattgcccgcatgggggcgcaggtggtggaactcgggccggtcaatgccactattcataaaattaatgaatgtgtgaacgctgccgacctgcagctacttgcccgtatgtatcaacgtatcatggaacagctcgtcgcctgatgagtggttctgcaagaggaaataagcatggactggctggctaaatattggtggattctggtgattgtctttttggtaggcgtcctgctgaacgtgattaaagatctcaagcgcgtcgaccataagaaatttctcgccaacaagccggagcttcccccgcatcgtgatttcaacgataagtgggacgatgacgacgactggccgaaaaaggatcaaccgaagaagtaagctgagtgctcaaccgtaggccggataaggcgttaacgccgcatccggcaatggtgaacgatgcctgatgcgacgctcacgcgtcttatcaggccaggtaatctgtcttttacatcatttcaatcacatcatcatcgccaggcttaccgccacttagcgcttcgtcgaaataatgtttcggaatggtataacgcaagtgatccagggcaaattgcatactgcgattgtcgatcgcatggcctaaatcctccacgatatccagcgtcacgtcaccaccggcactgattaacgcttcctgcgccgcaaccgcatgcgccagatcgataaccggatcttcaccgccatgaatcaggtgaattgtcgtggctgtagacgcagtttccggcaggctcgcatagcgtccgttaaaagcaatgacgcgactagcaaggcccggttcggctttaatgctctccagcaccataatcgcgccttgagagaaaccgatgagcgccgtggcgttagcccctactccgctctgtttctgccagtagcgcaccgtttcaataaacgtcggcatgatcgcatccacacgcgcctggcgattatcttccgtaataccctgcacgctaaaccactgacgccccgccggattaccgctcggctccgcgccaccgacactcaccaccagcgcatcaggaaacagcggtgcaaaccagttgcctatttcccccattgccaccgggttatccccgacaccgtggaaaagcagtaacaactgttgcgcaggtttatccgggctttgaacaacaaaatggtcatgtttcatggcgaactccttaactgatgtcattaattttacgccgctgactcacaatgaccatgagataaaattgaaggagtcagtgaaataattgccattgcgttatgcgatcgcgcagacgctcagtgcgaacatcattaagtgcgaacagcgcctgcgcggcctcttcccgctgacggaccagtaacatcttgcggccactaagtttaagtgtggtacataactgcgcatcactggcgtttttctgtaaacgcccacgcagcgccggtaatgccagttcactggtttgtaacagacgcaataagcaacctaagctcgttaatagcggacgatgagcgaaagcaaaaccggccagttcaagccagtcgtcgtcagaaaggacggcatcgtttagtggatcaacaggaagcgtttcgccattccactgcgcgagagcttgcgcatcgcgacgtaaacggtaatgctcacgttcagccagctgtttacccgcatcactcatcggtaacagcgccatcgccgtatagcaaccgctgctggcttcccgatgattacccatccgcaccagcacaaaaccgcagcgttgccagaaacgccataactccccggtgtaaccaaaactcacgctaagatagtcgaggtcttgcgtatattgcaaagcaccagcaataagttgccgccctgtgccttcccgctgacgagccggatgaactgctatccggctgacccgccgtccacgcaatgtcgccgccagtggattgttgccgtgcgccgccaggctctgggccaccagattaccccgcgggcgacgaaaacctgcccataccgcctgactgagttgttgagataatccaccctcatccaccagccacagcgccccggcaatctcgttttcgccagccgcctgtaaaaaatgttgccctggtgcatccatcatccggcgtaaatccagcgggctagtccgatagtgcgcaccagacaagagctgataaacctttaacggcgtttctggatcgctttgccataacgtctgttcaaatgcggaaatgacaatattgccttgtggtgtatgggtgaagttttcatcgtcaaaaaccagtgcctcgctgaccattttttccagcgggcatccctgcgcccagcggatcggctgttgcagttcaaaacggtgtaaatgcggaaagcgagcgcaaaatttcagcaaaaaaccacgtccggtgccttcgtagccctgcaccgtagtggttaacaacgttcgaggaaaacggcttaccagttgatgcaacaatggcgcaggtatggctgcggcttcatcgaccaccagccagtcggcttgctcatcgctggctaacaaggcatccggcgcaataaagcgaaacttctcgcccgcaaattgtgccagtacatccgtactcgcttttgcgggcgcggtgacaatcgctctgcccgcaatacgagaaatgagttgccctgccaacgcgctcttaccgcgcccacgcgcagccgttaccgctgccacgcccggcggcatggtcattagctgctttaagagttgctgttgttctggttgtggtgcgccagtcgcggggtaccagtcagtacggggagtaaaatgcgccaagctgaatggctggttttgccgccagaggatagcctcgttatccgccgtaagtacgcgtttgagatgctggacaaaatgcggcgtcgcaatagggtcagggcaatcactccagcgcaggctgtcggcatcaggttggttttcccactcttcccatacagggagtaacaaaaccagccagcttcccgctttcaacgttccgctaagtgcggcaaaggcagcggcatcaaagccgtggcgggcgtcgaataccgcatgccggaactcgcgcccaagtaaagtttgtagtgcgctgggagaacagtggttttcagcatctggccgcgggctaatccacagccagtcgccaggtaaggcatcacgcaacttaagagtatgctcaaaacaccaaccctcttccccgctcaacaccagcaagcggcggatcccttcacgtttcatttgcgctgttaatgtgtgaagcgcagtcagttcagccatccctgccccggaagttaaatgcttttaccaaaagtattgcattgtgccggatcgccgctgtcgaaaccacgtttaaaccagctgtagcgttgctgagaagtgccatgagtgaaactgtctggtactactcgcccctgactttgctgttgtaaacggtcatcgccgatggcctgcgccgcgttcagcgcctcttccagatcgccggtttccagaacgccttgctgctgcatactatgcccccagacaccggcaaaacagtcggcctggagttccatacgcacagataagcggtttacttccgcctgcgtcgcgttttgttgcagttgacgaactttcggctcgatgcctaacagtttctgcacatgatgaccgacttcatgggcgataacgtacccctgggcaaaatcgccatccgcgccaagtttgtctttcatgtcatcatagaaggagagatcgatataaaccgtgccatccgccgggcaatagaacggccccattatggactggcccgccccgcagccggtacgcgtcattccacggtacatgaccagcttcggttgctgataggtcttacccatcttctcgaactgttgtccccaggtgtcttccgtggttgccagaatcacgctggtgaattttgcggcttcgtcttcatttgggctaatactccgcgtactttgttgttgggaaaccggctgcccggtcatcaacccggttaaatcaacaccatagtagcctgcaaccagcacgactatcagtaaaatcagcccgcctttaccgcttggcaggcgaaaaccgggaccgcccatagatggaccaccagagctgttgcgcctgtcttcaacattgtcactttcacgtcgcccttgccaacgcatagatacctcaacaatatattcattatagaaatgatcgtaggtggttcagaggaagattaccacaggaaagcgggatgaaatggcggaggaatgagcgttcaatgcatatattccgagagcggttgtcttgccgtgccagctgcacggcaagatgatgaacagaaaaatcagtccagctgtacacccaggcggcgggcgacggcttcataggcttcgatcaggccaccgaggctctggcggaaacggtctttgtccattttctccagcgtttctttgtcccacaggcggctaccgtccggggagaactcatcacccagtaccacttcgcctttgtacagaccaaattccagcttgaagtcgaccagaatcagaccagcatcatcgaacagttttttcagcacgtcgttcgctttgtaggtcagctctttcatacgcgccaggttctctttgctcacccagccaaaggtttcgcagtaagattcgttgaccatcggatcgtgcatggcgtcgtttttcaggaacagatcgaacagcggcgggttcagctcaataccttcttcgattccaagacgtttcaccagagagccagcagcacggttacgcacgacacactcaaccggcaccatatccagctttttcaccagacattcggtatcggagagcagacgctccatttgagtcgggatacccgcttcagccagtttgctcataatgaagtagttgaacttgttgttcaccatacctttgcgatcaaactgctcaatgcgcgcgccatcccctgcactcgtatcattgcggaattcgagcaccaacaggtccgggttttccgtgctgtatacggttttcgctttaccacgatacaactcagcttgcttttgcatctttatcactcctgggtgtgaattaacgttttaaaatcttttgctgtctggtgtgccggatgttttgtcggatgcggcgtgaacgccttatccgaactacgtccgacaaacaaatttcgtgcgaattaccgctaaaatcgcgttttcctgcagacgcacacgtttgcgtatcatatcagaaaaaagggccggatgattccagccctgtatttttacttgctaaacgcagcctggaagacagctaccagcgcgtcgttctgactctgagtcagagtatgacctttcggatcgatgaactgtaggctgctgcggttatctaaatcgccaacctgcagtttatagtcaccggatgccaggcctggatcgctcgcgcccagttcctgccagtcgctgtcagacagcggcttataagttacggccatgttgccctggctacgggtgctgtcggtcactttcatgcccactttttccagcgccgctggcagacgttgccaaaccacattgaacggcccgcgtacgaccagcattggtaaaccggtgtcatcagctgcactttgtacgtccatagtggtggaggcacgattttgcgcagcgttcgcggcgtcagtggcagatttatccagaccggcggaaataacgttcatcatctccgtgctgtaacgctgcatggaagccgcgtctgcaaccggtttgcccgcctgttccaggttcagcagtttaaccgtaaccgcctgctgataaccctgcggcttaacagagatttgataacgaccacgatactgctcgtcttcgtccagacggttccattgtacccaatcggtggtcagtgtctgaccagcatcatcacgttgggtgatggtgtagtttttcgcctgcagcacgctaaccacctgcggccacagagtattgccacgaccattttccaccagcaaactagcggtatcgcccgtgaactgggtacgcgcgccagaaaccagtgccagcggctgggctggtggacgaatgtccagcgccttaccgacagcaccactaccgttggtcaccgggattgcataatcaccggaggtcaccggcaaaatcattccagccggggcatgaagctccgcaagcggtgccgcttccaggtaggcttcatcaccactgacctgacgcttatagcgactgtcagaactacaggcagcgagtaataaaacaaggctaacacccgcaacctttgccaggcggctcttttgaacagagtaagccatcaaatctccctaaactttacagcaaaccggcatgcttaagcgccgctctgaccgtctcacgaccactgtcggtgattggtgtcattggcaggcgcagcgtatcggtcgccacaagacccagttccttacatgcccatttcaccgggattggattgggttcgacaaatagtttgttgtgtaatggcatcagacgctgattaataacgcgtgcctcggcaaaatgcccttctgctgccagtttgcacatctgggccatatcacgcgctgcgacgttagccgtaacggaaataaccccatgaccgcccaattgcatgaagtccagcgcgctcgcatcatcgccgctcagcagaacaaaatcatcactaaccagctctttgatctggtttacacgcgttaagttccctgttgcctctttgattccgataatattttttactttcgccagacggcccaccgtttccgggagcagatcgcagccagtacgggacggcacattatacagaatttgcggcaggtcagtatgctcagcgatggctttgaaatgctgatacaaaccttcttggctcggacgattgtagtaaggggttaccgtcaggcagccgacgataccactgtcattgaagcgctgcgtcaggctaatggcttccgcagtagcgttagcgccggtcccggcaattaccggaatgcgcccatcagccagatccagcgtcatcatcaccacatcagcatgttcgtcatgatttaaggtagcggactcgccagtggtgccaacagaaacgatcgcgctagtaccgctggcgacatgataatcaatcagttttttcaagctagcccgacagacattacctttttcatccatcggagtaacaatcgcgacaatacttcccgtgaacatgggccatcctctgtgcaaacaagtgtctcaatggtacgtttggtatggcattaaaagcaagcagacagaaccgttctgattgttgtatgcatgtttttttatgctttccttaagaacaactcaccccttaaaggaataaccagtttgacactgagtagccaacattatctggtgatcactgcgttgggtgccgatcgccctggaattgtgaacaccatcacccgtcatgtcagtagttgcggctgtaatattgaagacagtcgcctggcgatgctgggagaagagttcacgtttattatgctgctttccggtagttggaatgccattactctgattgaaagtacgttaccgttgaaaggtgccgaactggatcttttaatcgtgatgaagcgcacgacggcgcgtccgcgtccgccaatgccagcatctgtctgggttcaggtcgatgtggcagactccccgcatttaattgaacgcttcacagcacttttcgacgcgcatcatatgaacattgcggagctggtgagccgcacgcaacctgctgaaaatgaacgggctgcgcagttgcatattcagataaccgcccacagccccgcatctgcggacgcagcaaatattgagcaagcgttcaaagccctatgtacagaactcaatgcacaaggcagtattaacgtcgtcaattattcccaacatgatgaacaggatggagttaagtaatgaatccactgaaagccggtgatatcgcaccgaaatttagcttgccggatcaagacggagaacaagttaatttgaccgacttccagggacagcgtgttctggtttatttctacccgaaagccatgacccccggctgtaccgtacaggcctgcggcttacgcgataacatggatgagttgaaaaaagcgggcgttgatgtgctgggtatcagcaccgataaacccgaaaaactctcccgttttgcggaaaaagagctgcttaactttacgctcctgtctgatgaggaccaccaggtgtgcgaacaattcggcgtctggggtgaaaagtccttcatgggcaaaacctacgatggcattcatcgcatcagcttcctgattgacgctgatggcaaaatcgaacatgtctttgacgatttcaaaaccagcaatcaccacgacgttgtgctgaactggctgaaagaacacgcctgattactttgctccattccgtgctggctgcgcttgcggccagcatacctcacttctcgtgatcaagatcacattctcgctttcccctgcgacacgggtgtcgaatccattttttgctgaacgttaatgaccatcatttttgtaccgttcagaatccagttaatacataacttattgaatatattgagttaatcagaatggcatcctttatgcaatatgaaatgcaatgtttcatatcattttcaaggagccgacatgaaccgctttgtggtggccgaaccactgtggtgtacaggatgtaatacctgtctcgctgcctgtagcgacgtgcataaaacgcaaggtttacagcaacacccgcgcctggccctggcgaagacgagtacaatcactgcccctgtcgtgtgtcatcactgtgaggaagccccttgcctgcaggtctgcccggtcaatgccatctctcagagggatgatgcgatccaactcaacgaaagcctctgtattggctgcaagctttgcgccgtggtctgcccatttggcgcaatcagcgctagtggaagccgtccggtgaatgcccatgcgcaatatgtttttcaggctgaaggcagtctcaaagacggcgaagaaaacgcgccaacacaacatgctttgctgcgctgggaacctggtgtccagaccgtcgcggtgaaatgcgacctgtgtgatttcttgccagaaggtccggcctgcgttcgcgcttgcccgaatcaggcgttacggctgatcaccggtgatagcctgcaacgtcagatgaaagaaaaacagcgccttgccgcaagctggtttgccaatggcggggaggatcccctttccctcactcaggagcaacgctaatggatgccctgcaattattaacctggagcctgattctctatctgtttgctagtctggctagcctgtttttactcggcctggacagactggctattaagctttccggcatcacaagcctggtgggcggcgtgattggcatcatcagcggaattacgcaattacatgctggtgtaactttagtcgcccgttttgcccccccttttgaatttgccgatttaaccctgcgaatggatagcctcagcgcatttatggtgctggttatctccttgctggtggtggtttgttctctctatagtttgacttatatgcgcgaatacgagggcaaaggcgcggcggcgatgggcttctttatgaatattttcatcgcaagcatggttgccctgctggtgatggacaacgctttttggttcatcgtgctgtttgaaatgatgagcctgtcttcctggtttctggtcattgccaggcaggataaaacgagcatcaacgctggcatgctctacttttttatcgcccacgccggaagcgtgctgataatgatcgccttcttgctgatggggcgcgaaagcggcagcctcgattttgccagtttccgcacgcttagtctttctccggggctggcgagcgcggtgttcctgctggcctttttcggttttggcgcgaaagccgggatgatgccgttgcacagctggttgccgcgcgctcaccctgccgcaccaagccacgctagcgcgttgatgtctggcgtaatggtcaaaataggtattttcggcatcctgaaagtagcgatggatctgctggcgcaaacgggtttgcctctgtggtggggcattctggtgatggcgatcggcgcaatctccgcgctcctgggcgtgctatatgcgctggcggaacaggatatcaaacggctgctggcctggagtaccgtcgaaaacgtcggcattattttgctggcagtcggtgtggcgatggtcggtctgagtctgcacgacccgctgctcaccgtggttggactgctcggcgcactgtttcatctgctcaaccatgcgctgttcaaagggctgctatttctcggcgcgggagcgattattagccgtttgcatacccacgacatggaaaaaatgggggcactagcgaaacggatgccgtggacagccgcagcatgcctgattggttgcctcgcgataagcgccattcctccgctgaatggttttatcagcgaatggtacacctggcagagcctgttcagtctaagtcgtgtggaagccgtagcgctacaacttgcgggtcctattgctatggtaatgctggcagtcactggtgggctggcagtaatgtgcttcgtaaaaatgtacggtattactttctgtggtgcgccgcgcagtacacacgctgaagaggcacaggaagtgccaaatacgatgatcgtcgccatgctactgctcgcggcactctgcgtattaattgcgcttagtgccagttggctggcaccgaagataatgcatattgcccatgcgtttaccaatacccctcccgccactgtcgccagcggaatagcacttgtacccggcacgtttcatacacaggtcacccccagtttactgttgctgttactactggcgatgcctttgctgcctggcctttactggctgtggtgtcgtagccgccgcgcagcgtttcgtcgcacaggagatgcctgggcatgcggctacggctgggaaaatgcgatggccccgagtggcaatggcgtgatgcagccgctgcgtgtggtcttttctgcgctatttcgtctacgacaacagctcgaccctacgctgaggctaaataaaggtcttgcgcacgtcaccgccagggctcagagcacagaacccttctgggatgagcgggtgatccgccccatcgtgagcgccacccaacggctggccaaagaaatacagcatctgcaaagcggcgactttcgtctctattgcctgtatgtggtcgccgcactggttgtgctgctaatcgctattgccgtctaaggaaatcaccatgagacaaactctttgcgacggatatctggtcatttttgcgttagcacaggccgtgattctgctgatgctaatcccactttttacgggtatttcccggcagatacgcgcgcgtatgcactcccgccgcgggccggggatctggcaggattatcgcgatatccacaaactgtttaaacgccaggaagttgcgccgacatctagtggtctgatgttccgcctgatgccgtgggtattaatcagcagcatgctggtgctggcgatggccttaccactgtttattaccgtttccccttttgcgggcggcggcgatctgatcacccttatctatcttcttgccctgtttcgttttttctttgctctttccgggctggataccggaagtccgtttgcgggagtcggtgccagtcgcgagttgacgctcggcattctggtcgaaccaatgcttattctcagtctgctggtattggcgctgatagcaggttccacgcatatcgagatgatcagcaatacgctggcgatgggctggaacagcccgctaaccaccgtactggcgttactggcctgtggttttgcctgcttcattgagatgggaaaaattccctttgatgttgctgaagcagaacaggaattacaggaaggcccgctgaccgaatattccggtgccgggctggcgctagcgaaatgggggctggggctgaaacaggtcgtgatggcaagtctgtttgtggccctgtttctgccctttgggcgcgcgcaagaactttctctcgcctgcctgctgactagtcttgtcgttacgctgctcaaggttttgctgatttttgtactggccagtatcgcagaaaacacgctggcacgcgggcgttttttactcattcaccatgtgacctggcttggcttcagccttgctgcgcttgcatgggtcttctggttaaccggtctgtaaggagcactgacggaatatggaaaatcttgctctgacgacgttattgctgccttttatcggcgcactggtcgttagctttagcccacaacgtcgggccgccgaatggggggttttgttcgccgcgctgaccacgctgtgcatgttgagtctgatctccgcgttttatcaggccgataaagttgccgtcacgttgacgttggtcaacgtgggggatgtggcgttgtttggcctggtcattgatcgcgtgagtacgctgattctgtttgtggtggtgtttctcggtttgctggtcacgatctactccacgggttatctgacggataaaaatcgcgaacacccgcataacggcacgaatcgttattacgcatttttactggtgtttatcggcgcgatggcgggactggtactctccagcacgctgctcggtcagttgttgttttttgaaattacaggcggctgctcctgggcgttgatcagttattaccagagcgataaagcgcagcgtagtgcactaaaagcgttacttatcactcatatcggcagcttggggttgtatcttgccgccgccacgctgtttttgcagaccggaacgtttgcgcttagcgcgatgagcgagttacacggcgacgcacgttatctggtttatggcggcatcctgtttgccgcgtgggggaaaagcgcccagctaccgatgcaagcgtggctaccggacgcaatggaagcgccaacaccgatcagcgcctatctccacgccgcaagcatggtgaaagtgggcgtttacatttttgcccgcgctattatcgacggcggcaatatcccgcatgtgattggcggcgttggcatggtcatggcactggtcaccattctttatggctttctgatgtatttgccacagcaggatatgaagcggttgctagcctggagcaccatcactcaacttggctggatgttcttcggcttgagcctctccatcttcggcagccggctggcgctggagggcagcatcgcctacatcgtcaaccacgcgttcgctaaaagcctgtttttccttgtagcaggtgcgctgagttacagctgcggcacgcgcttgttgccgcgtctgcgtggcgtattgcacaccctgccgttgccaggcgtgggtttctgcgtggcagcgctggcgattaccggcgtgccgccgttcaacggcttcttcagtaaattcccgctgtttgctgccggttttgcgttgagtgtggagtactggatcctgctgcccgccatgattcttctgatgattgaaagcgtcgccagtttcgcctggtttattcgctggtttggtcgcgttgtgcctggcaaaccgagcgaggccgtcgccgatgccgcaccgctgccaggaagtatgcgcctggtgttgattgtactgattgtgatgagcctgatttccagcgtaatcgccgcgacctggttgcagtaaggagatgatgaatgaccggttctatgatcgtaaataatctggcgggactgatgatgctgacaagcctgtttgtgattagcgtcaaaagctatcgcctgagttgcggattttacgcctgccagagtctggtgctggtgtctattttcgccactctcagctgcctgttcgccgcagagcaactgctgatctggtccgccagcgcctttatcaccaaagtgctgctggtaccgttaatcatgacttacgctgcacgaaatattccccagaacatcccggaaaaagcgttattcggtccggcaatgatggcactgctcgcggcgttaattgtcctgctttgcgcatttgtcgttcagcccgtgaagctaccgatggctaccgggctgaaaccggcgctggcggtagcgttaggtcattttctgcttggcctgctgtgcattgtcagccagcgcaatatcctgcggcaaatttttggttactgcctgatggaaaacggctcccatctggtgctggcgcttcttgcctggcgagcaccggaactggtggaaataggtatcgctaccgacgccatcttcgccgtcattgtgatggtgttactggcaagaaaaatatggcgtacccacggcacgctggacgtgaacaacttgaccgcgctgaagggataatgagatgagttattctgtgatgttcgctttactcctgctcacgccgctgctttttagcctgctctgttttgcctgccggaaacggagactttctgcgactcgcacggtgaccgtattacatagcttagggatcacactgctgctgattctggcactctgggtggtccaaactgccgctgatgcaggagaaatattcgctgcgggactgtggcttcatattgatggtctgggcggtttgttcctcgccattcttggtgtgattggctttctcaccggtatttacagcattggctacatgcgtcatgaagtggcacacggcgagcttagtcccgttacgctgtgcgattactacggtttcttccatctgtttttgttcaccatgctgctggttgttaccagcaataacctgattgtgatgtgggcggcgatcgaagccaccaccttaagcagcgcgtttctggtaggcatttacggtcagcgtagtagcctggaagctgcatggaagtacatcattatttgtactgttggtgtcgcttttggtctgttcggtaccgtgctggtatacgccaacgccgccagcgttatgccgcaggcagaaatggcgatattctggagcgaggttcttaagcaaagctccttgcttgacccaacattaatgctgttggcctttgtgtttttgctaattggctttggtaccaaaaccgggctatttcccatgcacgcctggctgccggatgctcacagtgaagcgccgagtccggtcagcgccctgctctccgccgtattgctgaactgcgcgctgttggtgctgattcgctattacatcattatttgccaagccatcggcagcgatttccccaaccggttgttgctcatcttcggcatgttgagcgttgccgtggcggcatttttcattctggtacagcgggacattaagcgtctgctggcgtactccagcgtggagaacatggggctggtcgcggtggagctaggcattggcgggccgctgggaatttttgccgcgctgctgcacatcttaaaccacagtctggcaaaaacgctgctgttctgcggttccggcaatgtactgctcaagtacggcacgcgcgatctcaacgtcgtctgtgggatgctcaaaatcatgccatttaccgccgtgctgtttggcggcggtgcgctggcgctggcagggatgccgcccttcaacatttttcttagcgaatttatgaccattaccgccggactggcacgtaatcacctgctgattatcgtcctgctgttattgctgttaacgctggtgctggcgggcctggtacggatggctgcgcgggtgttaatggcgaaaccgccgcaggccgttaaccggggtgatctcggctggttgaccaccagcccaatggtgattctgctggtcatgatgctggcgatgggaacgcatattccacaacctgtcatcaggatcctggcgggcgcttccactatagtcctcagtgggacgcacgatctgcctgcacaacgtagcacctggcatgattttttgcctagtggcaccgcatctgttagcgagaaacacagtgaacgttaatagtagcagtaatcgtggcgaagcgattctcgccgccctgaaaacgcagttccccggcgcggtgctggatgaagagcgacaaacgcctgaacaggtcaccattacggtgaaaatcaatctgctgcctgacgttgtacagtatctttattatcaacatgatggctggcttccggtcctgtttggcaacgacgagcggacacttaacggtcattacgcggtttattatgcccttagtatggaaggggccgaaaaatgctggattgtggtgaaggcgctggtcgatgccgacagtcgggagtttccgagtgtcacaccgcgcgtccctgccgcggtctggggcgagcgagaaattcgcgatatgtacgggctgattccggttggcctgccggatcagcgtcgcctggtgttgcccgatgactggccggaagatatgcatccgctgcgcaaagatgcgatggattatcgactgcgccctgaaccgacgactgattccgaaacgtatccgtttatcaatgagggcaacagcgatgcgcgggtgatccctgtcggcccgctgcatatcacctccgatgaaccgggtcacttccgcttgtttgtggatggcgagcaaattgtcgatgctgattaccgcctgttttatgtccatcgcggcatggagaaactggcagaaacgcggatgggctacaacgaagtgaccttcttaagcgaccgcgtgtgtgggatttgcggttttgcccacagtgtggcctataccaatagcgttgaaaatgcactggggattgaggtgccgcaacgagcacatactattcgcagcattctgctggaagtcgaacggctacacagtcatttgcttaaccttggcctctcctgccatttcgttggttttgataccggctttatgcaatttttccgcgtgcgggaaaagagcatgacgatggcggaattgctgatcgggagccgtaaaacctacggtctgaatctgattggtggtgttcgccgcgatattctcaaagagcaacgtctgcaaacgctgaaactggtgcgcgagatgcgcgccgacgtgagcgagctggtagagatgctgcttgctacgccgaatatggaacaacgcactcagggcattggcattctcgaccgacaaatcgcccgtgatttgcgctttgatcacccctacgccgactacggcaatattccaaaaacactgtttacctttaccggcggcgatgttttctcccgcgtgatggtccgtgtcaaagagacgtttgatagcctggcaatgctggaatttgccctcgacaacatgccggataccccactgctgaccgaaggctttagctataaacctcacgcattcgcgctgggctttgttgaagcgccacgcggtgaagacgtgcactggagcatgctcggtgataaccaaaaattgttccgctggcgctgccgtgccgccacctacgccaactggccggtgttgcgttacatgctgcgcggcaataccgtttctgacgcaccgctgattatcggtagccttgatccctgctactcctgtaccgaccgtgtgacgctggtagatgtgcgcaagcgccagagtaaaaccgtgccgtataaagagatcgaacgctacggcattgatcgtaaccgtagcccgctgaagtaaggacagaagatgctgaagttactgaaaactattatgcgcgccggaaccgcgacggtgaaatatcccttcgcgccactggaggtcagccctggctttcgcggaaaaccggacctgatgcccagccaatgtattgcctgcggtgcctgcgcctgtgcttgtccggcaaatgcgctggctatccagaccgacgaccagcaaaatagccgcacctggcagctctatctggggcgttgtatttactgcggacgttgtgaagaagtgtgcccgaccagagccatccagcttaccaataactttgaactgaccgtcaccaataaagccgatctctatacccgcgcgacgttccatctacaacgttgcagccgttgcgaacgcccgtttgccccgcaaaaaaccatcgcactggctgctgaattgttagcacagcaacaaagtgcgccacaaaaccgcgaaatgttgtgggcgcaagcgagcgtctgcccggaatgcaaacaacgcgcgacgctgatcaacgacgatacagatgtactgctggtggctaaggagcagctatgagtccagtgcttacacaacatgtcagccagcccatcacgctggacgagcaaacgcaaaagatgaagcggcatttgctacaggatatccgtcgcagcgcttacgtttatcgcgtcgattgcggcggctgcaacgcctgtgaaatcgaaatttttgctgccattacaccagtattcgacgcagaacgttttggcattaaggttgttagtagtccgcgtcacgccgatattttgttatttactggcgcagtcacccgggcgatgcgtatgcctgcacttcgggcgtatgagtctgcccccgatcataaaatttgtgtttcctacggcgcgtgcggtgtcggcggcggtattttccacgatctctacagcgtctggggcggtagcgacaccattgtccccattgatgtttggatccccggctgcccgccaacaccggccgccaccattcacggtttcgccgtggcgctcggtttgctgcaacagaagattcacgctgtggattatcgcgatcccaccggggtgactatgcaaccgttgtggccgcagatcccgccaagtcagcgtatcgccattgagcgagaagcgcggcggctggcgggctatcgtcaggggcgagaaatttgcgatcggctcctgcgccatttaagcgacgatcctacaggaaatcgggttaacacctggttgcgcgatgccgacgatccacgtctcaatagtatcgttcagcaactctttcgcgtactccgggggttacatgactgaagagtgcggggaaattgttttctggacgctgcgaaaaaagtttgtcgccagtagcgacgagatgccggaacacagctctcaggtaatgtattacagcctagctatcggccatcacgttggcgtgattgattgtctgaatgtcgccttccgctgcccactgacggaatacgaagattggcttgcactggtcgaagaggagcaagcccgacgtaagatgctgggggtgatgacttttggtgagattgttattgacgccagccacaccgccctgttgacccgggcattcgcgccactggcggatgacgcgacgtctgtgtggcaggcgcgtagcattcaattcattcatctgttggatgaaattgtgcaggaaccggccatctatctgatggccagaaaaattgcgtgagaaggatttctcattaataaggactgttgatggctatgagtgacgaggcgatgtttgccccgccacaaggaataacaattgaagcggtaaacggaatgctcgcggagcggttagcacagaaacacggcaaggcgtctttattacgcgccttcatcccgctgccgccgccgttcagcccggtacaacttattgaactgcatgttctcaaaagcaacttctattaccgctaccatgatgatggcagcgatgtgacggcaacaacagagtatcagggcgagatggtcgattatagccgtcacgccgtccttctcggcagtagtggaatggcggagctacgctttattcgcacccacggcagtcgttttacttcccaggattgcacactgtttaactggctggcgcggataatcaccccggttctgcaaagttggctcaatgatgaagaacagcaggtggcgctgcgtttgctggagaaagatcgcgatcatcatcgggtactggttgatattactaatgcagtgctgagtcatcttgatctcgacgatctgatcgctgacgtcgctcgtgagatccatcattttttcggtctggctagtgtcagtatggtactgggcgatcatcgaaagaacgagaagttcagcctgtggtgcagcgatctttctgccagtcattgtgcgtgtctgccacgctgtatgcctggcgaaagtgtattgctgacacaaacgctacaaacccgacaaccgaccttgacgcaccgtgcagatgatctgtttctctggcaacgcgacccgttattactcttacttgcatctaacggctgcgaatctgcgctccttataccgcttacctttggcaaccatacaccgggtgcattgttgctggcgcatacctcttccactctctttagtgaggaaaactgccagctactacaacacatagccgatcgcatcgctattgccgttggcaatgccgatgcctggcgtagcatgaccgatttgcaggaaagtttgcagcaagaaaaccaccagcttagcgagcagctccttagcaatctgggcatcggtgacattatctatcaaagccaggcaatggaagacctgctccagcaggtagatattgtggcgaagagcgacagtacggtgttgatttgtggtgaaaccggaactggcaaagaggtgatcgccagagcgatccatcaacttagcccgcgacgcgacaagccgctggtcaaaatcaactgcgctgccatccccgccagtcttctggaaagtgagttattcggtcatgacaaaggggcgtttactggtgcgattaatacccatcgtggtcgttttgaaattgccgatggcggcacgttgtttctcgatgaaattggcgatctgccgttagaacttcagcctaaactgctgcgcgtattgcaggagcgggagattgagcgtctcggcgggagtagaacgatcccggtgaatgtcagagtcattgccgccaccaaccgtgatttgtggcaaatggttgaagatcgccagtttcgcagcgatctcttttatcgcctgaatgtcttcccactggaattgccgccgctacgcgaccgtccggaagatatccctcttttagcaaaacatttcacgcaaaaaatggcgcgccatatgaatcgcgcaattgacgccatcccgaccgaggcactacgccagttgatgagctgggattggccgggcaacgtgcgcgagctggaaaacgtgattgagcgggcggtactgttgactcgtggtaacagtctgaatttacatctaaatgtccgacaaagccgtttactgccgacgctaaatgaagatagtgcgcttcgcagtagtatggcgcagttactgcacccgacgacgccagagaatgacgaagaagaacgtcagcgcattgttcaggtattgcgagaaaccaatggcattgttgccgggccccgtggcgcagcgacgcgattagggatgaagcgcaccacgctgctgagtcgaatgcagcggctggggatcagcgttcgcgaggtgttgtaatctgcttttgcaggagtatgcatgagaaacaaactctctttcgacttgcagttgagcgccagaaaagcggcaatcgctgaacggattgccgcccataaaattgcccgcagtaaagtgagcgtctttttaatggcgatgtccgctggcgtgtttatggcgatcggatttactttttacctttccgttatcgccgatgccccgtctagtcaggcattaacccatctggtgggcggcctttgctttacactcggctttattttgctggcggtttgcggcaccagcctgttcaccagcagcgtaatgacggtgatggcaaaaagtcggggcgtcattagttggcgaacttggctgattaacgcacttctggtggcctgcggtaatctggcaggtattgcctgtttcagtttgttaatctggttttccgggttggtgatgagtgaaaacgcgatgtggggagtcgcggttttacactgcgccgagggcaaaatgcatcatacatttactgaatctgtcagcctcggcattatgtgcaatctgatggtttgcctggcgctgtggatgagttattgcgggcgtagcttatgcgacaaaatcgtcgccatgattttgcccatcaccctgtttgtcgccagtggctttgagcactgtatcgccaatttgtttgtgattccgttcgccattgccattcgccatttcgcccctccccccttctggcagctggcgcacagtagcgcagacaattttccggcactgacggtcagccattttattaccgccaatctgctcccggtgatgctgggtaatattatcggcggtgcggtgctggtgagtatgtgttatcgggctatttatttacgtcaggaaccctgaaaaatcagcccggcgaaacagttcgtcgggctgaagattattcttgcgcgatttgcccatcgggccaggcatgaatcacggctttgatcagcgtcgccaacggaatggcgaagaatacgccccagaatccccacaaaccaccgaagatcaccacgcttaaaataatcaccagcggatgcaggttaaccgcttcggagaacaacaccggcactaacaggttgccgtccagcgcctgaataatcagatacaccgcgaagcagctccagaattcagtacctgcgccaaactggaatagcgccacgccaaccaccggaatggtcaccacaaatgcgccaatgtacggaataagaacgctgaagccgaccagcactgccagcagcaggctatagttcagcccgaagagcaagaaccccagccaggtggcgatccccaccacgatcatctccagcactttgccgcggatatagttggtgatttgttgattcatctccttccacacctgtcctgccagcccacggttacgcggcagcacccggcgaacggcgttcagcatctgctctttgtctttcagcaggaagaagaccatcaatggcaccagcaccagatagacggctatggtcagcaaaccgaccaggctggcgagggaaattttcaccacgctatcgcccatggtcagcatccgactgcgcatattttcggccattgcatcaataatgcccgcgtccattaacgccggatagcggcgcggcaacgtggcggcaaagtcagaaagcttattgagcatccccggcatatcgcggattaagtagatgccctgttgccaggcgataggcagtaccacgaacgccatcagtagcaatataccgacgaaaaccaccaatacaatgctcgtcgcccagcggcgggagcagccaatagattgcagacgcacggttggccattccagcaaataggccagcacaatagccaccagcaacggagcaagcaggccactaaagaaaaagataatgccaaatccggcaactaaaataaccagcaaggcaatcgcttccgggtcgctaaaacggcggcgataccattgcatcaacatttcgagcataaagaccttccctgaacctcaagagcgggattgcgatccgcaattgtatcgaaatgtcacaaaaaagacttcgctttttatgacggattcaggaaactgaaaagtcatttgagtgggctaatcttcgccgttacactcaaaggcggcgcggtgggaacgatatttcacagtatcggtcaaatgactatctccagaaatacaggatagaggttatgttcaggcagttgaaaaaaaacctggttgcaaccctcattgctgctatgaccattggtcaggtagccccggcgtttgccgacagcgcagacaccttgccggatatgggaacctccgcaggaagcacgctttccattggtcaggaaatgcagatgggcgactattatgtccgccagctacgcggcagcgcgccgttaattaatgacccgctgttaacgcaatatattaatagcctggggatgcgtctggttagccatgccaatagcgttaagacaccgtttcatttttttctgatcaacaacgacgaaattaacgcctttgctttctttggcggcaacgtggtgctgcactctgccctgttccgttattccgataacgaaagtcaactggctagtgttatggcgcacgaaatctcccacgtcacccaacgtcacctggcgcgagcgatggaagatcagcagcgcagcgcgccgctgacctgggtcggcgcgttaggttctattttactggcgatggccagtccgcaggcggggatggcggcgctgaccggtacactggcgggaacgcgtcaggggatgatcagtttcacccagcaaaatgaacaggaagcggaccgcattggtattcaggtgctgcaacgcagcggattcgatccgcaggcgatgccaaccttcctcgaaaaattactcgatcaggcgcgttactccagccgcccgccggaaattttattgactcacccgttgccggaaagtcgtctggcagatgcccgcaaccgtgctaatcagatgcgcccgatggtggtgcagagcagcgaagatttctatctggcgaaagcgcgcacactggggatgtataattccggacgtaaccagctcaccagtgatttgctggatgaatgggcgaaaggaaacgttcgtcagcaacgagcagcacaatatggtcgtgctttacaggcgatggaagccaataaatacgacgaggcgcgtaaaacgctgcaaccgttactggcggcagaacctggcaacgcatggtatctcgatctggctactgatatcgatcttgggcaaaacaaagccaatgaggcgatcaatcgtctgaaaaatgcccgcgatttacgcaccaatccggtgttgcagctcaacctggcgaacgcttatttgcaaggcggtcaaccacaagaagcggccaatattctgaatcgctacacctttaataataaagatgacagcaacggctgggatttgctggcacaggcggaagccgcgctaaataaccgcgatcaggagctggctgcgcgagcagaaggttatgcgctcgccggacgactcgatcaggccattagcctgttgagtagcgccagtagccaggtgaaattaggcagcctgcaacaagcgcgttacgatgcgcgcatcgaccagttgcgccagctgcaggaacgctttaagccttataccaagatgtaattcgcattaaaggaagaacaatgaccaaacaggtaaaaatctaccataacccacgctgtagtaagagccgggaaacgctgaacctgctgaaagaaaacggcgtggagccagaagtggtgctctaccttgagacacccgccgatgcggcaacgctgcgcgatttgctgaaaatactggggatgaatagcgcccgtgaattgatgcgccagaaagaggatctttataaagaactgaacctggctgacagtagccttagcgaagaggcgctgattcaggcaatggtggataatccgaagctgatggagcgcccgattgtggtcgcgaatggcaaagcgcggattggtcgtccaccggagcaggtactggaaatcgtgggttaagatgtgctccatcgctagttgaagcacattgccggatgcgacgcttgccacgtcttatccggcctacgaatactatggattaacttcgcgtagttcggataaggcgttcgcgccgcatccgacaataaacaccttatttacaacttcagaatttctttcacaaacggaatggtcagcttacgttgcgcggtaatgctcgcacgatccaactgatccaacgtcataaatagcgtgcgcatttctctgtcgagccgcttcagcaagaaacgccccacatcttccggcagttcaaaaccacgcaaacgcgcgcgtaactgtagcgcctgcaacttatcttcatcagaaagtggctgcaatttgtagatctgcccccagtcgagtcggctcgcgagatccggtaatcccagattcaactgccgcggtggacgatcgccggtgatcaacaaccgtgttttgccgctttccagaattcgattgtagagatcgaaaatcgccatctcccacaactcatcgcctgcaatacactcaatgttgtcgatacagaccaggctcaaatgctccataccgtcgagcacttccggaacaaaccaggtgcgtttatccagcgggacatagcccaccgcatcgccacgctggctcaattccgcgcaagccgcgtgcagcagatggctgcgccccgcgccttcgcgtgcccagagatagatgtaaccgctatgttcctgacgcagcacgttttgcagcgcggccagtaaagaggagttatcccccggccagaaacttgcaaaggtttcgtcgtcaggaagataaagtggcaaagagagctgtgccggtgtgttcagagatacctcaaccaggatttcacaaaatcggctgaagtttaccacagaatcccatgatgtttgaaccgggcagcaacactgcccggtcggtacattatttgtctgttatatccgcgtcttctgcgtccagcaccacttcttcagggcgcagcacactgatcagtttgaagatcaaacttaagccgataccgacgatggtcgccagcgccataccttttaactccgccgcgccgatgtttaccttcgcgccactgacgccgatgatcaaaatcacggaagtcaggatcaggttctgtgctttgttgtaatccactttgctttcgatcaaaacacgaataccggaagcaccgatgacaccataaagcagcaggctaacgccgcccatcaccggcaatgggatcatctggatagcggcagccagtttaccgacgcaggaaagcaggatagcgaaaatcgccgccccgccgataacccaggtactgtaaacacgggtgatcgccatcacgccaatgttttctccgtaagtagtatttggcgtagagccaaagaagccggaaatcacggtgctcaagccattagcaaacatgctacggtgcagacctggatcgcgcagcagatcttttttgacgatattagccgttactaccaggtgccctacgtgttcggcaataaccactaacgccgctggcagaatagtcagaatggcaaaccactcgaagcgcggcgtatagagggttggcagcgcaaaccagtgagcattaataatcggcgtggtatcgacaattcccattgcgaaagagagcgcgtaccccaccagcacgccaattaaaatcgggataattgccaggaaaccacgaaacagcacggaacctaaaaccgtgaccgccagggtggtaatagagatgatgatggttttggagtctggcgtttgcccttcagccgggagtaaacccgccataccggcagctacgcccgccagctccagaccgatgacggcaacgattgcgcccattgccgcaggtggaaacagcacgtccagccagccggtccccgctttcttcacgataaaagaaaccaggcagaacagcacgccgcacataataaagccgcccagcgcgacttcataccctaacggcaacagtaacaataccggactaataaaggcaaagctggaaccaagataagccggaattttccctttacagatgaagagatacagcagcgttccaataccgttaaataacagtacagtcgccgggttaatatgaaataagacgggcaccaggacggttgcaccaaacatggcgaacaaatgttgcaaactaagcgggattgtctgtaaaagtggcggtctttcactcaccccgatagcacggcgcgtcatagtattatcctctgtattatgtgttataggcgctttactcaaaaaaaagccgactcttaaagtcggctttaattatttttattctttatttcgtaccaaagattttgtcaccggcatcgccgaggcccggaataatgtatccgtgctcgttcagtccctgatcaatgcttgcggtatacagttcgacgtccgggtgcgctttttccagcgcagcgataccttctggcgcagctaccagcaccagaactttgatgctgctgcagcccgcttttttcagcaggtcgatggtcgcgataacggaaccaccggttgccagcattgggtcaacgatcagcgccatacgctcatcgatgttagaaaccagtttctggaagtacggtaccggctccagcgtttcttcattacggtacataccgacaacgctgatgcgcgcgctcggaacgttttccagcacaccgtccatcataccaagacccgcacgcagaattggcacaacggtaattttcttacctttgatctggtcgatttctaccgggccgttccagccttcgatagttactttttccgtttcgaggtcggcggtcgcttcgtaagtcagcaggctacccacttcggaagcgagttcgcgaaagcgcttggtgctgatatcttgctcacgcatcagtcccagcttgtgtttgacgagtgggtgtttgacttccacgatcttcatactctttctcctttgaggggcagccacaaaaaaaatcgacggattatacctcctttcttcaaggcggcaatattcttttcgttgactttagtcaaaatgataacggtttgagataaagttattttatattcagatggttatgaaagaagattattccatccgaaaactaacctttaccctggcacaagtcttctttcgccgcgcgcctggggaaaagacgtgcaaaaaggttgtgtaaagcagtctcgcaaacgtttgctttccctgttagaattgcgccgaattttatttttctaccgcaagtaacgcgtggggacccaagcagtgaccgataaaacctctcttagctacaaagatgccggtgttgatattgacgcgggtaatgctctggttggaagaatcaaaggcgtagtgaagaaaacgcgtcgtccggaagtgatgggcggtctgggcggcttcggtgcgctgtgtgcattgccgcaaaaatatcgtgaacccgtgctggtttctggcactgacggcgtaggtaccaagctgcgtctggcaatggacttaaaacgtcacgacaccattggtattgatctggtcgccatgtgcgttaatgacctggtggtgcaaggtgcagagccgctgtttttcctcgactattacgcaaccggaaaactggatgttgataccgctagtgcggtgatcagcggcattgcggaaggttgtctgcaaagtggctgtagtctggtgggtggcgaaacggcagaaatgccggggatgtatcacggtgaggattacgatgtcgcgggtttctgcgttggcgtggtagaaaaaagtgaaatcatcgacggctctaaagtcagcgacggcgatgtgctgattgcactcggttccagcggtccacacagcaacggctatagcctggtgcgcaaaattcttgaagtcagcggttgtgatccgcaaaccaccgaacttgatggtaagccattagccgatcatctgctggcaccgacccgcatttacgtgaagagtgtgctggagttgattgaaaaggtcgatgtgcatgccattgcgcacctgaccggcggcggcttctgggaaaacattccgcgcgtattgccagataatactcaggcagtgattgatgaatcttcctggcagtggccggaagtgttcaactggctgcaaacggcaggtaacgttgagcaccatgaaatgtatcgcaccttcaactgcggcgtcgggatgattattgccctgcctgctccggaagtggacaaagccctcgccctgctcaatgccaacggtgaaaacgcgtggaaaatcggtatcatcaaagcctctgattccgaacaacgcgtggttatcgaataatgaatattgtggtgcttatttccggcaacggaagtaatttacaggcaattattgacgcctgtaaaaccaacaaaattaaaggcaccgtacgggcagttttcagcaataaggccgacgcgttcggccttgaacgcgcccgccaggcgggtattgcaacgcatacgctcatcgccagcgcgtttgacagtcgtgaagcctatgaccgggagttgattcatgaaatcgacatgtacgcacccgatgtggtcgtgctggctggttttatgcgcattctcagcccggcgtttgtctcccactatgccgggcgtttgctgaacattcacccttctctgctgccgaaatatcccggattacacacccatcgtcaggcgctggaaaatggcgatgaagagcacggtacaagcgtgcatttcgtcaccgatgaactggacggtggcccggttattttacaggcgaaagtcccggtatttgctggtgatagcgaagatgacatcacagcccgcgtgcaaacccaggaacacgccatttatccactggtgattagctggtttgccgatggtcgtctgaaaatgcacgaaaacgccgcgtggctggatggtcaacgtctgccgccgcagggctacgctgccgacgagtaatacccccgtaattaaagcgccagctctgccgctggcgtttttcaattcacctgtaaatcgcaagctccagcagtttttttcccccttttctggcatagttggacatctgccaatattgctcgccataatatccaggcagtgtcccgtgaataaaacggagtaaaagtggtaatgggtcaggaaaagctatacatcgaaaaagagctcagttggttaagcttcaatgaacgcgtgcttcaggaagcggcggacaaatctaacccgctgattgaaaggatgcgtttcctggggatctattccaataaccttgatgagttctataaagtccgcttcgctgaactgaagcgacgcatcattattagcgaagaacaaggctccaactctcattcccgccatttactgggcaaaattcagtcccgggtgctgaaagccgatcaggaattcgacggcctctacaacgagctattgctggagatggcgcgcaaccagatcttcctgattaatgaacgccagctctccgtcaatcaacaaaactggctgcgtcattattttaagcagtatctgcgtcagcacattacgccgattttaatcaatcctgacactgacttagtgcagttcctgaaagatgattacacctatctggcggtggaaattatccgtggcgataccatccgttacgcgctgctggagatcccaagtgataaagtgccgcgctttgtgaatttaccgccagaagcgccgcgtcgacgcaagccgatgattcttctggataacattctgcgttactgccttgatgatattttcaaaggcttctttgattatgacgcgctgaatgcctatagtatgaagatgacccgcgatgccgaatacgatttagtgcatgagatggaagccagcctgatggagttgatgtcttccagtctcaagcagcgtttaactgctgagccggtgcgttttgtttatcagcgcgatatgcccaatgcgctggttgaagtgttacgcgaaaaactgactatttcccgctacgactccatcgtccccggcggtcgttatcataattttaaagactttattaatttccccaatgtcggcaaagccaatctggtgaacaaaccactgccgcgtttacgccatatttggtttgataaagcccagttccgcaatggttttgatgccattcgcgaacgcgatgtgttgctctattatccttatcacacctttgagcatgtgctggaactgctgcgtcaggctagcttcgacccgagcgtactggcgattaaaattaacatttaccgcgtggcgaaagatagtcgcatcatcgacagcatgatccacgccgcacataacggtaagaaagtcaccgtggtggttgagttacaggcgcgtttcgacgaagaagccaacattcactgggcgaagcgcctgaccgaagcaggcgtgcacgttatcttctctgcgccggggctgaaaattcacgccaaactgttcctgattagtcgtaaagaaaacggtgaagtggtgcgttatgcacacatcgggaccgggaactttaacgaaaaaaccgcgcgtctttatactgactatagcttgctgaccgccgatgcgcgcatcaccaacgaagtacggcgggtatttaactttattgaaaacccataccgtccggtgacatttgattatttaatggtaagcccgcaaaactcccgccgcctattgtatgaaatggtggaccgcgagatcgccaacgcgcagcaagggctgcccagtggtatcaccctgaagctaaataaccttgtcgataaaggcctggttgatcgtctgtatgcggcctccagctccggcgtaccggttaatctgctggttcgcggaatgtgtagcctgatccccaatctggaaggcattagcgacaacattcgtgccatcagtattgttgaccgttaccttgaacatgaccgggtttatatttttgaaaatggcggcgataaaaaggtctacctttcttccgccgactggatgacgcgcaatattgattatcgtattgaagtggcgacgccgctgctcgatccgcgcctgaagcagcgggtactggacatcatcgacatattgttcagcgatacggtcaaagcacgttatatcgataaagaactcagtaatcgctacgttccccgcggcaatcgccgcaaagtacgggcgcagttggcgatttatgactacatcaaaagtctcgaacaacctgaataaccctatgccaatacacgataaatcccctcgtccgcaggagtttgctgcggtcgatcttggtagtaacagttttcacatggtcatagcccgtgtggtagatggtgccatgcagattattggccgcctgaaacagcgggtgcatctggcggacggcctggggccagataatatgttgagtgaagaggcaatgacgcgcggtttaaactgtctgagcctgtttgccgaacggctacaagggttttctcctgccagcgtctgtatagttggtacccatacgctgcgtcaggcgctgaacgccactgactttctgaaacgcgcggaaaaggtcattccctacccgattgaaattatttccggtaatgaagaagcccgtctgatttttatgggcgtggaacatacccaaccggaaaaaggtcgcaaactggttattgatattggcggcggatctacggaactggtgattggtgaaaatttcgaacctattctcgttgaaagccgccggatgggttgtgtcagctttgcccagctttattttcctggcggggtcatcaataaagagaattttcagcgcgctcgcatggcggcagcacaaaaactggaaactttaacctggcaattccgtattcagggctggaacgttgcaatgggcgcttccggtaccataaaagccgcccatgaagtgttaatggaaatgggcgagaaagacgggataattaccccggaacgtctggaaaaactggtaaaagaagttttacgtcaccgtaatttcgcaagcctgagtttaccgggtctttccgaagagcggaaaacagtcttcgttccgggactggcgattttatgcggtgtgtttgatgctttagccatccgtgaactgcgcctttctgacggggcgttacgcgaaggcgtactgtatgaaatggaaggacgtttccgtcatcaggatgtgcgtagtcgcaccgccagcagcctcgccaaccagtatcacatcgacagcgaacaggcccgacgggtgctggataccactatgcaaatgtacgaacagtggcgggaacagcaaccgaagctggcgcatccgcaactggaggcgctactgcgatgggccgccatgctgcatgaggtcgggttgaatatcaaccacagcggtttgcatcgccactccgcttatattctgcaaaacagtgacttgccgggttttaatcaggaacagcagctgatgatggcgacactggtgcgctatcaccgtaaagcgattaagctcgacgatctaccgcgctttaccttgtttaagaagaaacagttcctgccactgatacagctattgcgccttggcgtattactcaacaatcaacgtcaggcaaccaccacaccgccaacattgacgctgattactgatgacagtcactggacactgcgtttcccgcatgactggtttagtcagaatgcgctggtactgcttgatctggaaaaggagcaagaatactgggaaggcgtggctggctggcggttgaaaattgaagaagaaagtacaccagaaatcgccgcttaatactttgcgggccgacgagaaatgtcggcccgcattattcaggcactttcgcgaatgggttcgatttcattcagcgtatcaattaacggctgcggcttaccaataagataaccctgcatataatcgatccccaaagagagcaccgcctcgcggatctcttcgttttcaacgtactctgccactaccagcattttcttcattcgcgccaggtggcaaatgcttgccactatctgataatccagactattactcacaatattgcggataaaactgccgtcaattttaagcagatcggcattcacatttttaagccgcgcatagctggcgtagccggtgccgaaatcatcaatcgcaatctggcagcctaattcctgaagatgctgcaaggtgatttgcgcctgcttaacattggtcagagcattactttcggtgacttcaaaaataagttgccacgcttcaatctgatatttagccagcaactgactgacttcaacaggaaaacgagcctgacatacgctggttggagacagattaatagcaaaacggtgagcgggcatcttcgctctgttttcagccataaattgcagcgtatgctcaatgacccacatgtcgatactgctgcttaaaccaaattcgtgcgcgaccggcaagaagctatcggggctgatcagttcatcattctcacctttcatgcgcagaagaatttcatggtaaacatcaccacgcataccggtaatcggctgggccatcaggaaaaaatggttgtgttccagcgcctgctgtagtcgattcatcatcgcgactttatctttcaattcgcgttgcaaatacattgccccgcgacgctgcatattttccggggcgttggtcacgatggaaagttcggcgaccgtatttagctctcccagcagcaggtagatatgattcactgggctgcgcacatagcagtaactgacgccaatctgcggttgcatcggcatgccatcccaaaagaaacgaaattgcttgagatggctatccagtgcggtaatgcgctcctggtggctttctgtattcagtcgcagcgcgagatcgttaccgctaagctgataaacatcttcacccggttccagcaagggactcagccagtgagaaagtttttgcttgtattgaatccgcagcatgatgccatagttcttaaccagcatttccatgccagggatgcgtaaataacaaagcgcagaccagggggcatcacgcaacgcgcgattcagggcgcgaacatttggcagatgaaccaccgggtccacatacgcaagccgctgaatgcgtctgactaccgctctctgacgggttgccagtacagccatataattgacaataaaagagaataccagataactggaggaggttatggtcagctgcgtggtatagccaggataaatgggaatgtaattttgatagctgtggatgctgatcatcaacacgaccgcccagagcaggctaatcagcttataaccatagcgcatcgctccccacatcatcaggggcagcaataaactcaaggtataattggtgctaaaaattgtgcttttttcatttaacggcatgcataacagcaacaataaagcacctaatgccagtagccagagcgcgaactcttttttggtgactttggcatcaacctgctgttttaattggctataatagctacgtaaataaaatggatttcgcactacccgaatgatgaagtagcacagcgggacaccgatcagattacccaccagtaaggcctgataattgattaaagtcccgaggttaaaaggcatgacaccgaccagattttctctgctcgccagtaatcctacaaatgcagcaaactggaaaagtatcagaaacagcgttgcaggaaacacaatctgccagaatatacgctgggaaattaaacgggtatcaccatgactaacgttgttacgccggggagtaaagaccctgtaaccgccccaacagagaatgataatgataataaaattagccgttaaacttagcgtttcgtaaaaacccagctctgcatatttgcggacaaaaatccctaaggcgatccctggcaatgccgcccagctgaaaaacatcatcatgctgatcatcagtgccagaggcagataaaagagaaaaacctcaccggaagaaatatgcgcgaaagtattaatgtgggcgaaaatgggcaagattaaagaaggcaggaacagcggaagcccccaccatttatcacgtatttttatataagttgcattcagtttcatagatgctcagcagaatcccccacatcctgaaggaggtgtattcagacaggcatcccacctgacttcgaatgatgattattcatcactatagagagcattgattctaagtgtcatatgaaagtaccaattgatatatatcaaacaaaataaccctgattaatgaattattacgtttatcatgttaattcatcattattacatcatcattgtaaataattaaattaacttccataacattaaaatatgtatccactgacgcttttttacataacgaagaattgaccattttgtcctgttgtgccttaatgtaagtaccgtccacagcgtgggacatacttcaaggaaccttttgtgagtcaggcaaccagtatgcgaaaacgacaccgatttaacagtcgcatgacccgtatcgtactgctcatcagctttatcttcttctttggccgttttatctacagctccgtcggtgcctggcagcaccatcagagcaaaaaagaagctcagcaatccacactctccgtcgaaagtccggtacaacgttaacggttaccttctccactttcacagaacataacggcacttcgctgtcggatgcttttgctgtttgggattatcaaagcggcagatattctttcatcttaaattttacgtctttatcctgactgatgtttatcctgtttggctgcgaaataaatataaaattaatatatatgttgtaatgatatatttttataaattattccctgcgtgaattttaataaatttaatctatccctttatacgcaatacatttactttcctcttttgatgatcttaaatgtcttatttttcgtaatgtgtataacaaggaatagtgatgaaatttaaaaaatgtcttctgcctgtggcaatgttagcgagtttcactctggcaggatgccagagtaatgctgacgatcatgctgccgatgtttatcaaaccgatcaactgaataccaaacaagaaactaaaaccgttaatattatttccattcttcccgcaaaagttgccgtagacaactcccaaaataaacggaacgcacaagccttcggcgcgcttattggcgcagtcgctggcggtgttatcggccacaacgtcgggtctggcagcaattccggaacgacggcaggtgcagttggcggcggagctgtaggcgcggcagcgggttctatggtgaatgataaaaccttagtggaaggtgtttctttaacctataaggaaggcaccaaagtgtatacctctacccaggtgggtaaagagtgccagtttacgacaggtttagccgttgttattaccacgacgtataacgaaacgcgtattcagccaaataccaaatgtcctgaaaagagctaataatcaggaggagtcatgaagaaagtttttctttgcgccatcttagcctccttaagctatccggctatcgccagtagtttgcaggatcaactctctgctgtcgcagaagcggaacagcaaggtaaaaatgaagagcaaaggcagcatgacgaatgggtcgcggagcgcaacagggaaatccagcaagagaagcaacgtcgcgcaaatgcccaggccgccgctaacaaaagagcggcaacggcagcggcaaataagaaagctcgtcaggataaactggacgccgaagcctctgcggacaaaaaacgcgatcaaagttatgaagatgagctacgcagcttagagattcagaaacaaaaactggcgctggcgaaagaagaagcccgcgttaagcgagaaaacgaatttatcgatcaggaactgaagcacaaagctgcgcaaaccgatgtggtgcaatctgaagctgacgccaacagaaatatgactgaaggcggtcgcgatctgatgaaaagcgtgggcaaagcagaagagaacaaaagcgacagctggtttaattaatcgatgttagtaacttcaatcctataattcttgaagataaaaaaccctctgtagtaacagagggttttgttcattcatagtgcagggtcaaatcattcccactcaatggtagctggcggcttgccgctgatgtcatacaccacgcgggaaataccgttcacttcattgataatgcggttggaaacgcgaccgaggaaatcgtacggcagatgcgcccagtgtgcggtcataaagtcgatggtttcgacagcacgcagagagacaacccagtcatacttacgaccatcgcccattacgccaacggaacgtaccggcaggaacacagtgaacgcctggctgactttgtcgtacaggtccgctttacgcagttcttcaatgaagatggcgtcagcacggcgcagcaggtcacagtactctttcttcacttcacccagaacacgaacgccaaggcctggtcccgggaacgggtgacggtacagcatgtcgtacggcaggcccagctccagaccaatcttacgcacttcgtctttgaacagctctttcagcggttcaaccaggcccatcttcatctctttcggcaggccgcccacgttgtggtgagatttgatgacgtgtgctttaccggttgcagacgccgcagattcgataacgtcagggtagatggtgccctgcgccagccacttcacgtcttccagtttcagcgcttcttcatcgaatacttcaacgaaaacgcgaccgatgattttacgttttgcttccggatcgttttcgccagccagcgcactcaggaagcgatcttctgccggtacgtgaacaatgttaagaccaaagtgatcgccaaacatatccagaacctgctctgcttcgttgaggcgcagcaggccgttgtcgacgaatacgcaagtcaggtttttaccgatagcgcggtgcagcagcattgcggttacggaggaatccacaccaccagagaggccgaggatgactttatcgtcgcctacctgctcgcggatgcgagctacagcatcgtcgataattttcgctggcgtccacagggcttcacactggcagatatcacgcacaaaacgctccagcatgcgcataccctggcgggtatgagtcacttccgggtggaactgtacgccatagaagcgtttttcttcgttagccataatggcaaacgggcagctttcggtgctggctacggtgatgaagtcggacggaatagcggtaactttatcgccgtggctcatccagacatcgagcagcggtttaccgtctgcggtcagcgcatcttcgataccgcgaaccagtgcgctgtcgtttacgacttcaacctgcgcgtagccaaattcacgttcgttagaggcttcaacgtgaccgcccaactgcattgccatggtctgcatgccatagcaaacgccgaataccggtacgcctgcttcaaagacatactgcggcgcacgcggactgttttcttcagtagtactttccgggccgccggaaagaataatgccgcttggattgaagtcacgaatttgtgcttctgtcacatcccacgcccacagttcgcagtaaacacccagctcacgcacgcggcgcgcaaccagttgagtgtactgagaaccgaagtccagaatgaggatgcgatgcttatgaatgttttccgtcattgacgcttattccgaggcaagtgaaacagataatataaatcgcccgacatgaagtcgggcgaagagaatcaggagcccagacggtagttcggggactctttagtaatggtcacgtcgtgaacgtggctttcctgaatgcccgcaccgctgatacgtacaaactccgctttagtacgcagttcgtcgatagtaccacagccggtcagacccatacaggagcgcaggccgcccatctgctggtgaatgatctctttcaggcgacctttataggctacgcgaccttcgataccttccggcaccagtttgtcggcagcgttatcgctctggaaataacggtcagaggaacctttggacatcgcgcccagggaacccataccacggtaagatttgtaagaacggccctggtagagttcgatttcacccggagattcttcagtacccgccagcatggaacctaccatcaccgcgcttgcgccagcggcgatagctttggcgatgtcgccggagaagcgaataccgccatcagcgataaccggaataccggtgccttccagggcttctactgcgtcagcaacagcggtaatctgcggaacaccgacgccagtcacgatacgagttgtacagatagagccagggccaatgccgactttaaccgcactgcaaccagcttctgccagagcgcgtgcacctgcagctgttgccacgttgccgccgataatttgcagatccggatatttagcacgggtttcacggatacgttgcagtacaccttcactgtgaccgtgggaggagtcgatcagcagaacgtcaacgcctgcggcaaccagcgcgtcaacacgctcttcgttacccgcacctgcgccaaccgctgcaccaacacgcagacggccttgctcgtctttacaggcgttcggtttacgttccgctttctggaagtctttcacggtgatcatgccgatcaggtggaattcgtcatcaaccaccagcgctttttcaacgcgtttttcgtgcatttttgccagcaccacttcacgggcttcaccttcacgcacggtgaccagacgctctttcggcgtcatgtaaacgctaaccggctggttcaggtcggtaacaaaacgcacgtcacgaccggtgataatacccaccagttcgttttcttcggtaacgaccggatagcccgcaaaaccgttacgctcggtcagttctttcacttcgcgcagcgtcgtggttggcagaacagtctgcggatcagtcaccacaccagattcgtgttttttcacacggcgaacttcttctgcctggcgttcaatggacatgtttttgtggataaagccgataccgccttcctgagccagagcaatagccaggcgcgcttccgttacggtatccattgctgcggaaagcatagggatattcagacgaatagttttcgtcagctgggtgctgaggtcagcagtattcggcagaacggtagagtgagcaggaacgaggagaacgtcgtcaaacgtcagagcttctttagcgatacgtagcatgggcaatatctcgaccagagtggttaataaatattgccgcggcattatacagagcgtaaccgattgcatctacccctttttgcaaaaaatgcttgctatccccgaagggcgggttactatcgactgaataacctgctgatttagaatttgatctcgctcacatgttaccttctcaatcccctgcaatttttaccgttagtcgcctgaatcaaacggttcgtctgctgcttgagcatgagatgggacaggtttggatcagcggcgaaatttctaatttcacgcaaccagcttccggtcactggtactttacactcaaagacgacaccgcccaggtacgctgcgcgatgttccgcaacagcaaccgccgggtgaccttccgcccatagcatgggcaacaagttttagttcgcgccaatattacgctctacgagccgcgcggcgactaccagataatcgttgagagtatgcagccggccggtgaagggctgctgcaacagaagtacgaacagctcaaagcgaagttgcaggctgaaggtttgttcgatcagcaatacaaaaaaccacttccctcccctgcgcattgcgttggtgtgatcaccagtaaaaccggtgctgcgctacatgatattttgcatgtgttaaaacgtcgcgatccttctctgccggtgatcatctaccctgccgccgttcagggcgatgacgcgccggggcaaattgttcgcgccattgaactggcgaatcagcgcaatgagtgcgacgtattgatcgtcgggcgcggcggcggtagcctggaagatttatggagttttaacgacgaacgcgtagcgcgggcgatttttaccagccgcattccggttgtcagcgccgtcgggcatgagacggatgtgaccattgccgattttgttgccgatctgcgtgcgccaacgccgtctgccgccgctgaagtagtgagccgtaatcagcaagagttactgcgccaggtgcaaagcacccgtcaacggctggagatggcgatggattattatctcgccaaccgcacacgtcgctttacgcaaattcatcaccgattacagcaacagcatccgcagctccggctggcacgccagcaaaccatgcttgagcgcctgcaaaagcgaatgagctttgcgctggaaaatcaacttaagcgtaccgggcaacagcagcagcggttaacacagcggctgaatcagcaaaatccacagccgaagattcatcgcgcgcaaacgcgcattcagcaactggaatatcgtttagcagaaaccctgcgcgcacagcttagcgccacgcgtgaacgtttcggtaatgcagtaacgcacctcgaagccgtaagcccactgagtacgctggcgcgtggatacagcgttactactgctactgacggcaatgtactgaaaaaagtgaagcaagttaaagcgggtgaaatgctaaccacacgtctggaagacggctggatagaaagtgaagtaaaaaacatccagccagtaaaaaaaagccgtaaaaaggtgcattaagccagcacgaattcaacgcgttttttgcttatcaagccatgcccgtgctgacagaagtaatctactgcaccacaggcttttaacacctgcaacggttgatggcagtctggacaaagagctttcatttcaataaattccccgcaggatcggcaacgcgcatggccgttatcctgatcaagcacatgctgacattgtggacaatgcagttccatatgaattcctccggtagccattccctctacattcatagagggaatggcagataaaatacttacggataattatttatttttcttgatgtgcttcatcagacgcttacgtttacgcatctgggttggcgtcagggtgttacgcttattcgcatacgggttttccccttctttgaactgaatacgaatcgggcttcccattacgtccaggcttttgcggaagtagttcatcaagtagcgcttgtaggaatcaggcaggtctttcacctgattaccgtgaatcaccacaatcggcgggttataaccaccggcgtgggcatatttcagcttcacacgacgaccgcgtaccagcggcggttggtgatcttcaacagccatcgtcatgatgcgcgtcagcatagaggtccccacacgacgggtggagctgtcatacgcttcacgtacactttcaaacaagttaccaacaccactgccgtgcaaggcagagataaagtgcacacgagcaaaatcgataaagcccagacggaagtccagcgtttctttcacctgctctttcacttcctgactcaggccatcccacttattcaccacaatgacaagactgcgcccactattgagaataaagcccagcaggctgagatcctgatcggaaataccttcgcgcgcatcaatcactaacatcaccacgttggcgtcttcaatggcctgcaacgttttgattacggagaatttctctacagcatcggtgattttgccgcgtttacgtacgccagcggtgtcaatgagcacatactcacgtccatcgcgttccattgggatgtagatgctgtcacgcgtcgtgccaggcatgtcgtaaacaacaacgcgctcttcaccaagaatacggttagtgagtgtagacttacctacgttcggacgacccacaatcgccagtttgatcggcagactttgcgggtcgaagtcgtcttcctcttcttcttcgccgttctcttccgcttcaaattgcgcccagtattcagcgtcttcgtcgacttcctcttgcggtgcgagatcttccatccacggcagcagcacatgctccagcagacttaatacgccacgaccgtgagacgcggcgatcgggtagatttcacctaaaccaaggctgtagaaatcaaccactgcctgatcgggatccagaccgtcagttttgtttgccaccaggaaggtcggtttttcacgggagcgcagatgtttggcaatcgcttcatctgccggcatcaggcccgcgcgcgcatccaccataaacagtacgacgtccgcttcttcaatcgccagcaggctttgttccgccatgcgggtttctacaccgtcttctgtgccatcaatcccgccggtatcaatacagataaactcacggccttcaatttccgcacgaccgtacttacggtcacgagtcagacccgggaaatccgcaaccagcgcatctcgggtgcgagttagacggttaaataacgtggattttcctacgttagggcgcccgacaagcgcgaccacaggtaccatgtttaaagcctcatttttataaatcatcagacaacgcacgctatattcgcgtcgttgttaaaaacaggaaaacggcccctgtccaggagccgttttcaaagtgaacgacagagacgattaacgtgtaatagagtacacggttccgtcttttgcctggatcagcagtttgccgtcagcggcaaccggttcagtctggaaaccggaactatcaactttttgctgggcaacgaaacgaccatcttcgacgttaatccagtgcagataaccttcactgtcaccgaccaccaggttgccattatacagcaccggagaagtcagcaggcgatgcagcagatcgctttgtgtccacagcgtaacgccgccatcaatggtcaacgccatcacccggtcattttgatcgaccagatagatgcgattgccgtcgacgatgaaatcattcacgctacccagttcgcgtttccacataatctgaccactgcgcagatcaagcgccgtcaggttaccattataggccagcgcgaaaacaacgccgttaacaacgacgggagtcgtgtcaacatcgctcagacggtcaatttcggtagaaccggtcgcctgggaaatacgctgctgccaaatcatctggccctgttccatcagcactgcgctgacgcgaccattatcgccccccacgacggccgcaccaaaagccgttgtcggcgcagactcgccacgcaaagagaggctaggcatatcgaggttaactgtccatttgacagcgccgtcagcttcgttcagcgcttgtaactgaccgttactggtgtggattaacaccagaccgtcgctgaccaccgggcggctaagtgcttcacccgcgactttagtttgccatgccacagtaccatcgctggtattcagcgcgtaaacctgcgccttttcgctgccaatgtagacatgcccaccagacacggtcacaccgccagaaagtaatgcaggctctttagagaaccagccatctttctcggccaggctgacagaccagatttctttgccatcatccgcattcagcgcttttactaaaccagcgcggtccgctgcatagacaacgttgtccgccagtgccggatgaagattggaatagaagttgccaatgccgctaccaacggaagtgctccacgccgtggtcggcgtaaactggttttcaacggttggcaatggggacatctttaccacatcttcttcgctgttaaacaggctacagccgcttaaaagggtaacggaaagcagtcctggcagcagtaatttacgcaattgcatcgggtccctctcagatggacaaattattaattttcatctgcatcatttcgctcagtgccggagtaacatcgcttttcacgcctgcttcccatgcactacgcgcaccttgcttatcacctttgctcagcaatgcttcaccacgcaggtcggcaacaatggcagcccacccttcacctttgatggtatcaagggttttcagcgcggcatcagcctgcttgagctgtacctgaacgcgagcaagacgcagatttatcacggctttgagattttcatcgctcgtgtctgccagcccctgttgtaactgggcggcagctttctctagttcatttttgtcaacaaattgctgcgcaagttccaaagaagccagcgcaccataagtatttttattttcagcagcaaatttttccgccgccgggatgctatccggtttgccttcgctcactgcggtaaccgcattttgataggcaagagaagcggagcgtgcagaatcaacctgatggctgttccagtagcgccagccaatcagtgcgccaacgcccaaaatcaccccaacagccagtgctttgccattttcagcaaaaaagcgtttaaccgcttctacctggtcgttttcgttctcgtaaatttccacgctgtccttctccttccttaacccagtaacgtgcgcaaatgcgcggctacgctatcctgcgcaactgccgtttgctcaccagagcgcaaatccttcactactgctgtgccgttagccacttcagactcacccagcaccacagcaacgcgggcaccccatttatcagcacgggcaaactgtttcttaaagttgccgccgccgtggttggtcatcaatttcacgcccggtaattcatcacgcagacgctcagctaatgccatagccgcagattgtgtatcagcaccactagccaccaggtatatatcgacaacaggatcggctttaaattccggattaacggcctgtactaacaatacaagacgttcgaggcccatagcaaaaccgacagccggtgttgcacgaccgcccagttgttccacaagaccgtcataacgaccgcctgcacacacggtgccctgggagccgagactgttagtcacccactcgaaaacggtacggttgtagtaatccagaccacgcaccagacgctggtttacggtgtaagcgatccccgcgctctccagcagtttgcacagaccggcaaaatgctcacgagattcctcgtccagatagtcacctaatgccggagcgtcgttgagaagcgcctgcacttccggatttttactatccagcacgcgcagcgggttagtgtacatgcggcgtttgcagtcttcgtccagcttttctttatgctgctcaaggaatgccaccagcgcatcgcggtaattggcgcgtgcttccaggctaccgatagagttcagctcaagagttacgtgctcggaaatacccagcgcgcgccaccagcgggcagtgagcataatcagttcagcgtcgatatccggaccttgcagaccgaaaacttcgcagcccaactgatggaactgacgataacgccctttctgcggacgctcgtgacggaacatcggcccgatataccacagacgctgttcctgattgtacagaagaccatgctcgatgccggcgcgtacacagcccgccgtcccttcagggcgcagagtcaggctgtcgccattgcgatcctcaaaggtgtacatctctttttcaaccacgtcggtgacttcaccaatcgcacgtttgaatagcggggtctgctctacaatcggcaagcggatttcactgtaaccgtagctgccgagcacgtttttcagtgtgccttcaatgcgctgccagatggccgtttcgccaggcaggtaatcgttcatgccgcgaatggcttgaatgttttttgccacgtttattctctttctgaatataaaaatgaaccctcaacgcttccctcaatgtttcgggagccatgcgggttcaatcatacacgggaagcgaggcgcttcccatcacgttattatttttcaacctgctgaacgtcaattcgacgcgcttcgtccagctgactggctttcgcacgaatgcgtgcttccagctggtcgatcatatcgttgttgtccagacggtctttgcgcacgccatcttcatagaggccgcttttcttgttgccgccggtgacgccgagtgtagaaaccagcgcctcacctgggccattcaccacgcagccgataatgctaacgtccatcggagtgatgatatcttccaggcgttgctccagcgcgttaaccgtaccgataacatcaaattcctgacggctacaggtcgggcaggcgatgaagttgatccctcggctacggatacgcaggcttttcaaaatatcgaaaccgactttgatctcttcgaccggatcggccgccaggcttacgcgcagcgtgtcgccgatgccttcagacagcagcagacctaaaccaatggcggattttactgccccgctgcgcgcaccaccggcttcggtgatccccagatgcaacggctgatcgatctgttttgccagcaaacgataagactcaacagcgaggaagacgtcagacgctttcacgctgactttgaactgatcgaagttcaggcgatcgagatgatcaacatgacgcatggcagattccagcaacgcctgcggcgtcggttcgccatacttttcttgcagatctttttccaggcttccggcgttaacgccaatacggatcggaatgtttttatcgcgcgcacagtcaaccaccatgcgaatacgctcttcattaccgatattgccagggttaatacgcagacaatcgacgccgtattccgctactttcagcgcaatgcgatagtcgaagtggatgtcagccaccagcggcacgttaacctgctgtttgatgagtttgaacgcttctgccgcgtccatcgtcggtacggatacacggacgatatcagcgccaacgcgttccagcgccttgatttgattgaccgttgcttcgacgtctgtcgtacgcgtattggtcatggactgtacggcgatgggagcaccatcgccaatcggcacattcccaacgtaaatacgtgtactttttctacgttgaattggagcctggttatgcatgaaaaatctcccgcgttacccgtctgttactgcgccggactttgttcggcattgagggtcagacgcgcaacctggttagttctgataaaacgactcagatcgacaggtttcccttgatactggatctgtactgcggctggcgcaccaattttcagtttgtacggtgcctggccggttaagttcaaattaccgtctttacgctgcataccgctaaacaattttttaccggtagcatcagtgacctccagccagcaatcggcagtaaagttcatcaccagcgcattcggatcagccaccggcgtggtcacgccagcctgatcggttggcaacggcgcagcaccatctggcgttgttgctgccgttggtgccggggtcgcggcggtatcaacatttgcctggctagggctaacaaccgcattctgttgcggatcaacagctggtgctggcgcagttacggcaggtgtttgcgtgttggttgcggtagtatccacagacgctggcggcgtggacgttgtagccgggtctgtagttgtgctcgtatttaatggaacactctgcccctgctcgctattactgctcagttccgcgctagattgatcggccatagtggtgatctcttcctgctgagctttgcggtcttgccaccaccaggcaccgctcaggccgataaccacaaacaacaccagccaagtgaaggtcatcagccagccgtcgcgttttttgcggcgtttaccgagggaaaaactctgcatcggcgcaacttttgcagcccgaagtggagcctgcttttccagccctggcagcagttcttcttctggaatatgtaccagacgcgcataagagcggatatatccgcgcaggaatgtactagcaagatcggcgggtgccttatcttcttcaatgtcgcgtaccgtggaaaccttcaggcaaagtcgctcggcaacggcctgctgactaagtcctagttgttcgcgagcattacgcaggcgagcgccggtagtaagtgcttcattttggtcgtgcgtggcttcagtattcattcgctgcaggtacgtttaaatgagaattgagatgccggtgaaccatcatgctcacccacaccgcgaaacatccgttaagttaaccgttatcatacagtataagaccgtctgtgtgctcgtgacaaagcccacattcactaaggctaacttactgttgcatcgttacatactgccttaaagtcagcaaaaacgcaccgttaatattgaccagacaattgcaacttaatacttcattcataaaacattacgccacggtacataaagtaaccgtggcgtaatggctatcagaccgctttaatgtcgatggcttcaccctgcatccgtttacgcagggtacgtttcgtacggtcgataacatcgcccgccaactgaccacaggcagcatcgatatcatcaccacgagttttacgcacaatagtggtgaaaccgtagctcatcagcactttactgaaacggtcgatacggctgttgctgctgcgtccatacggcgcacccgggaacgggttccacgggatcaggttgatcttacacggcgtatctttcagcagttccgccagttggtgcgcgtgttcagtgccgtcgttaacgtggtcaagcatcacgtattcaatagtgactcggccctgattggcgttggatttctccagataacggcgcaccgcagcaaggaacgtttcgatattgtactttttgttgatcggcacaatttcgtcacgaatttcgtcgttcggcgcgtgcagggaaattgccagtgcaacgtcgatcatatcgcccagtttatccagcgccggaactacaccggaagtggaaagcgtgacgcgacgtttagacaggccaaaaccgaaatcatcaagcatgatttccatcgccggaacgacgttgttcaggttgagcagcggctcgcccatgcccatcatcactacgttagtgatcggacgctgaccggtgacttttgctgcgccgacgattttcgccgcacgccacacctggccgataatttcgctcacccgcaggttgcggttaaagccctgctgggcggtggaacagaatttacactccagcgcacaccccacctggctagagacgcagagcgtggcacggtcgtcttccgggatatacaccgtttcgacgcgctgatcgccaacggcgatcgcccatttaatggtgccgtcagaactacgctgttcttcaaccacttccggtgcgcggatttccgccacctctttcagtttgccgcgcaacactttgttgatgtcggtcatctcatcaaagttgtcgcagcaatagtgatacatccacttcatcacctgatcggcgcggaagggtttttcacctaaatctttaaaaaactcccgcatctgctgacggttgagatccagcaggttgatttttccatctttcgtggtgacgttttcaggtgtgactaattgttcagacatatgctattccggcctcgttattacacgttatggcccctggagggttgaaaaaagaaacgccccggtgagcggctgctcgtccgggggcgctgcattgtacaaattctggcgcacggatgccacgtttgcacgcggcatttacgaaattattaacgggtgcgcgggcacacttcgccttcgccaaagaaataagcgatttcgcgagcggcagattcgacggaatcagaaccgtgggtaccgttttcggtcaggctgtcagcgtaatcagcgcgcagagtaccagccagtgcgtttgccggattggtcgcgcccagcagatcgcggtgacgctgaacggcgttttcaccttccagcacggaaaccacgatcgggccagaggtcatgaattcaaccagaccatcaaagaacggttttccatcgtgttcagcataaaagccacgtgcctgttcaacggtcaggtgcagcattttggtgccaacaattttgaaccctgcagcttcaaagcgcgcaaagatattaccaatgacgttttttgctaccgcgttcggtttgatgatggaaaaagtacgttcaatagccatttttacctctgtaaattgttctgttgttgtctgtaccagcgtacgagatggcgcggattataatgagcaacagggccgttgactattgatgaaggtaacatttttttaaaataaaatgagttttagcaacaatcagggacaaaacagattattgcatgacaaatttcactgtcgcgatttgccccacgtcatccatcaccagcaattgataatcacctttatccgtcaaatgcagggtcacgttgcgcccgcgttcagttaacggttcgccattcagaaaccaccagcgttcacctgcccctccactactttgcaacggcaaagtcgcttccgctgcgcccggtaaacgtttaataatcgcgccatcgcgaacgcctgtcagctgcagcgggagctgggcatcgtgaccgtatggcgggcaacttgtgctggccggtggtaagcgcacagcgcgacgttcacttgcgggcagccagggttccagcggtagcggccagacatttatcatttcttgtcgcgcttgcgggcaatcagcggcaacacgtttgccattttcatccagccagatggggaaacgaatgccattaatgccttcctgctccggcagtaatagagttggcggctgactcccgtccagcagccaggttgccaggcggcggcgacagttaccgtcaccttccggcaaagactgtccgcccggccagcagataacgccacgagtgacactgttcgggcgcgggtcttccggcagattcgcactgcggctcagtaagatattattgacctgattcaacaatggtacggcactggcaaagccaaactgaccaacaacgggcgtgccgtccggtctgccagtccagatcccaatgacatagcgagcgttaaccccaatcgcccaggcgtcacgatagccatagctggtgcccgttttccatgccagtggggcgacgcgcggcaaggcactatccggcaagggttgcgcttcatcagccataatccggcgaatgatccacgccgccccgctgctcattaaaggccgttcaagcagcggatcgtcaggctgtaagcgcaatttgcctgccttgccgtggcgagcaaacgcggtatacgctgccgccatatcttccagttttgcaccagcgccgccgagaatgagactaagattcggcgcagcaccgttgggcaaatataacggcaatccaacattgcgtaactttgccgcaaaccgtttcggtccataggcttccagcacctgcacagcaggtaagttcaggctgcgcaccagcgcctcgctcatgctgatcgggccatgaaaaccgctatcaaagttacctggtcgataatcaccggtgcgccgggggacgtcttgcagcagacttgccgggtggatcaagccttcatccagcgccagaccataaacaaacggtttgagcacacttcctgggcttcggatgctattgaccatatcaacatgaccaaagcgactatcatcgttgagatcaacgcttcccacccagccgcgaacacgcatatcggtatgatcaaccacgatcatcgccagactgctgcgcggtggcaaccgccctttccagttttgcgccagttcttccagacgtcgttgaagaccggcatccaacgtagtagtgattttgtcgcttttgcttttaccgagcatcatgcggctaaacagcggtgccagttgcggcatttgtcggggggccagccagatgggttcttccctactctcttttacctgctcacgggaccacacaccttgcacggccatccgttcgagcactttattacgcgcggcttcggcacgctccggccaacgatccgggcgaagacggctgggcgcttgcggcaaaaccgccagcattgccgcctcggaatagcttaaattcgcagggctttttccgagataagcccaacttgccgcaccgatcccctgcaacgtaccgccaaacggagcgcggttaagatacaaggtcagaatttcacgcttagacagatgccattccagttgcaacgcgcgccagagctggcgaattttgccgccaaatgttttggggtgaggatcaagcagacgagcaacctgcatagtgagcgtgctgccaccggaaataacccgtccgctagtgagatcttgccatgctgcgcgcgccacgctgaatggattcacccccggatgcttccagaaccagcgatcttcataattgatcagcgcttcaaggtaacgtggagaaacatcttcgattgttaccggataacgccagatgccgtcagcatcggcgaagcgccagagcggcgtaccatcctgcgccacgaccactcgtgcgggattgacttcatgcagcggtagaggccagagtttatctgctccccacgctgcaagaaaaaggagaaagggcgcggctgccaacgttatccagcagccgcgtttggttaacaagcgaggcatttacggtctgacaatcagcagatcttcagccgcgccggtcgcccgccattggggaacatacatactttccaccatcggttgcggtacctgatacgttcccggcgtcaccgcccgcgccagatacaccagcgttaccggttggtattcatcaacggcaaccgccgccacaaagcgatcgtcacggaactcaatgtgcttaatgctcgcctgctgcatctggttcagtaagttctgcacttcgccaccactttgctccaggctggcgctaccgttcgccagattctggttttccagttccagacccgcaggcagcagatccacgactaacgcatccggcacgctgttactggcttttacctgcaaccacaccagcaccagatcgccgctacgtaagctgtccaggcttttgctcttaccatcagtaccaagaatatgacgctcgatttgcagcacattgttcgccggtaaaggtgcggattgcggataaccgctggcatccatacgcaaccataacggctgatcgccactgttgctcacctgcaaggtgacaagttgatcgctattcagattgctgttttgcgctttctcgcctgtcagctgctcagcactgaaagaggtttgcgcctgccatttaccgggtaaatcctgaatcgtacgggcagccaggaacaacgcgttactttcctgcgtgcttagccagcgttcaccaaacgcctgctggctaagtgtgttcagcaaagtgtactgctcatcgggtagcagtttattttcttccagcaaggagagcattaacgcgttgtcgcgcagactactaccgtaatcacccagccatatccgctcatcactattacgcggcgttttcagcgccagcgcaatcgcttcttcaccacgcgtcgcatcacccatggttttcagcgcaacgccaagttgcagcagcggtaaaccagaagcggcatctgcacgatgctcccagatttcacgcagcgcacccagcggagccttttgctgacgggccaacaccagcgcagcgtaagactgtacggcgaatttactggctttgagattatccgcgtacgggatgctcatcatgcccggatcttgtaaatagcgcagcagacgctcattaccccggttaatggcgtctgtcggcacgctgtaaccctgttcgcctgcgcggaccaggaaatccatcacgtaagccgtcagccagtactcttcgtcaccgtttttatcccacagcgcaaagccgccgttatcacgttgcatttgcagcaaacgggaaatgccgatatcgacgcttgcacggcgtttctcatcactgtcgcctttgatgcccaacgcctgcagttgggctgcgttggtataaagactcggaaacaggccgctggcggtttgctcaagacagccgtacggatacgcttttaactctttgatataacgtgcgatgttcagcggtggtttgccgctcaacaacaattgcccttccagcgtaacagggctgaagttttgcaatccatccgccggaatcgcccatgtctcaccaggctgtaacgccgtaccgtaattaaccgtttgtgccgggaacgccggacggacgccgattttccactgcttatgctgatcggcaacggtttcacccggtaacgctaacccgctaatggtggcctgaatttctccatcgccataacccggcaatgctcgcaccgggataaacagcgtagtacgcacacctggcgctaattcaacggctgcgggactatcgctgaccagttcaagcaaaccactggcggtcagggcaacgttcagtttttgcggtttatcggtaagattagtgatatccagcgtcagacggctggtatcgccactcgccataaagcgcggcatgttcagttcagcaatcaccggtgcggcaactatcactttactttcgttgctaccgaagtcatctgccgtccaggcttgcgccatgacgcgcaattcaccgttaaaatcgccaatcggcagtgtaacgctgccttcgccctgttcgttgagcgttaccggcagcgcctgctgcacgacaatattgacgtgattgaccggcggtttaccaccacgtttcagctcatcaccatcgccaccgaaacgcagagctgccagacgcccctgaccttcaataacctgaccgtaaatatcgtaaatgtctgcgccatagcgtttctgaccaaagaacgcctgccacggatctggcgtgacgtagtcagtaatattcagcacaccactatcaacggcagacaccagcacattcacctgtttaggcttctcgccatttttagtgctggctttaattttcacggttaatggttgattgggacgcatttttgctggtgtttccagcgccagatcgaggcgacggttttcatcgccaagcggcagatgcaacacaccaaccgcgcgttttggcgtcgcggagcgagatttatcgccaggacgtaccaccagcgtacttaaatacagatcatgacgattccaggttttatcgaccggaatcgtcagatccagcccttgagcccgaacatcaatctcttgccaccacagcggcccttcactggactcgaccatcgcataacctttacccgccgttggcgcggcgatatgcaacttaatggtgtcgccagggcgataactggctttatccagtttcagcgtgacacggtcgggtcgcactgcgccgctaccgtcgctgttgtcctgccagctatagccagcccagaaacgaacactactgaccgcttcattcggcgctttgacttccagacgataagcgccccactctaccggaaaactgaccttgccggtttcgtccgctttcagatccagagtttgttcattttcgatcagatctttttgatcaaactgactctgccagccttcatcttcactccagttccagtagtaatcgcggcgttcgcgaatcaggcgcacctgcaagccgctcacggcttttttcacgccttgcgcatcgctataaacgatgtcaaaagcggcgttactgccttcatcaacaatgggctgtttcaccgtgctgtcagtacgataatcgtaaacgcttttgctggcgaactgcggacggatccccggcaatgcatcggcaggccagatagcctgctcagcgcggcgcgtcaccgggcgaccgccgctttccagcaaactaccctggaaaataacctgtaatggggaatgcgtttccttccactggctttctgtagaaacttcgccgcgccctttatcatccagcgtcaactgaacttcatccagcgtgcgggaaagattttcggcagctatatcgccgaattcaaaaccaggtaaggcactcacagcttcacgcagtgggcgcaggaaaagttgcccttgcaaagtattaccattagcaggtgcaccatacaggtagtaccccaccacggagaatttcacttcatctttcggcgttagcggggttttctcaccggtcagattcagcgccatgcgctctggcataaaatcttcgacgtggaaatcccacatccgatactgattatcgcccgtgttagcgcgaatatgccacataccggttgccgcattgctatcgagtggccaggtaaagtggtagaggccattctccggctgactaacgacgctcctgagtacctgcccatcgggtttaatcacgtctaacttgatgggttgattgggcaacgctttaccgtctgcatcacgcagcaaaccattgaggattaccgtttcacctgggcgataaagatcgcgtgggccaaacatgaaaaactgtttgctatagcctggcgcgccagcaatgttaaattctgctaagtccagcgccggaagttttaaatcgagtagcgttgtctgaccgtctttacgcgccaacagtaatgccgcgtttttatcattttccagctgcacatgcccctgagcgtcactggttgcctgagtcagagtctgccctttctcatttaataaagagacttcaattccttgctgggccgcgccgttttccagactttgggtaaagatatccagacgattgtgataacggtgagcactaacgccgatatcacttaacgtaaacagcgtcgcgggattactgtaatcgtaacgtccagcctgattcatcacagccagatacacgcccgcctgctgaagcggtttgatatcgcccagcggcagcaataatttttcacgggtgttacgcgcaggattgagatcaaaccgtccggtgtagaccagatccgccatctgcagcagtttgtcactctgccagttcgccaggctattgcggtattcccattggctaatgaatgctggcagagattctggcttaacgcggaagaagttaacatcgacattattaacgttgagcgccattaccggcagcccttcaacgactttgccaggcagcaggctaccacggctggcaaaaccgacgctgggttggatgtcgcgggtagttatagttttttcgtaatctttactgaaggttgcgttgttgagtgctttgacctccttgccaatagtaacgatcaaatcacgtttcggttcgaggtggcgtaaacgtaactctttaagattatcactcagctcccaggcaccatccactttgccgcttttttttatcgacgacatgaataacgcgactgaaatcctgatccgggtcgagagggatggagaacgtcagcaccagcgtggctgcaccatcaagttggacttcagagagatccagcaatgtcagcaccttaccggcactctgttgggccagtttttgtctctccggcacggagagttttgcactactcgcgttttcactagaggccgctttagtaacttcagaaggcgcatcttttttcaccgctgttggcgcgttatcgttgttgtcgcaccctgccagcgccagcattagcatgcaggcggctacgcgtaactttttcatttttcatccctgccacaatggcccgttagcaacgtcgaataattattatgcgtgagaatttacgttatgtaattcagtatcacgcccatacaatccgaattttagtgagaattgtggctcagacagccaaatcagcctcttttgcttgtcgcttttcactaaacatccgacaatttagcctaaccccggcaaaaatggagatgcctatgtccacgacatggtttgtaggagccgactggctcgccgaacatattgatgacccggaaattcagattatcgatgcccgcatggcgagccctggacaggaggatcgtaacgttgctcaggagtatctgaatggacatattcccggcgcagtgttttttgatatcgaagcgctttctgatcacacttccccgcttccgcacatgctgccgcgcccggaaacgttcgccgtggcgatgcgtgaattaggcgttaaccaggataagcacctgattgtctatgacgaaggtaatcttttcagtgccccacgagcatggtggatgctgcgcacctttggtgtagagaaagtgagcattctggggggtggacttgcaggctggcagcgcgatgatctgctgttagaagaaggtgcagtagagctgccggaaggagagtttaacgccgcgtttaatcctgaagccgtggtgaaagtaaccgatgtattattggcaagccatgaaaatacggcgcaaattattgatgcccgcccggctgcacgttttaacgcagaagttgatgaacctcgcccaggtttacgtcgcggacatattcccggagcactgaatgttccgtggacggaactggtgcgcgaaggcgaactaaaaacgaccgatgaactggatgcgatattttttggtcgcggcgtcagctacgacaaaccaattatcgtcagctgcggctctggtgtaacggcagccgtggttttgttagcactcgcgacgctggatgtgccaaacgtgaaactgtacgacggcgcatggagtgaatggggcgcgcgggcagatttaccggttgagccagtgaaataagtattttacaggcaataaaaaaccgccgaatttggcggttttttattgctagtctggttcgcggcctttccagcaggttgacttgtgttacatgagcaacgcaggtgcttcacagcaaaacaatactcaccagtaactctctttttgtcaagcaaaagagagtaattattgtttatttagcgtattatcgacaccggccctttccgccgtgttcggtaataaaataacctggcttattagtccgaattcagacaaatataaataaatcctgctcaaaattaaaaattctaaccggtaaaagatattacttaaacatgtaaattcactttcctttaaaaaacaaaaaaccgccaaaatcaggcggttttttgttgctggtccggttcgcggcctttccagcaggttgtattaccgtagtaatgcaagcgcgtctcagcggagacaatactcgccagtaactctctttttgtcaagcaaaagagagttattattgttctgttagtgtattatccactgcggccctttccgccgtctcgcaaacgggcgctggctttaggaaaggatgttccgtggccgtaaatgcaggtgtttcacagcgcttgctatcgcggcaatatcgccagtggtgctgtcgtgatgcggtcttcgcatggaccgcacaatgaagatacggtgcttttgtatcgtacttattgtttctggtgcgctgttaaccgaggtaaataataaccggagtctctccggcgacaatttactggtggttaacaaccttcagagcagcaagtaagcccgaatgccgccctttgggcggcatattttagattatccgattctgtttaaagtcacgcaaaaaaccaccccagcgacgttcatagaatggcgcaatatgttcggtaataaagtggctaattcctttttccccttttttcacctgacaaatatcgattggttcatcgccaggtaatgtatcggtcgctacacttcccgtcgcctgaataatttcttcgatatcaccatcggcttcaatgccaataagtaaattaggctgtgcctcttcgttctctttaatactacaaataaaagcacgcttcaccggcttaatggttttaaataaggtggtgagactatcaatcatttgtgctggcggctctgcgacttcgcttaatatcaggctttcaccgccttccaggatttcctggctgctcagcggatttccctcttcaccaatcaacaaactgatttcacgcggcataaattctttaccggttggcagtttggcattaaggaagagcgtttcgccaagtgtcatctcaaacagcgtgcgaacgggcattacgacaaatgcctgttcgtcttcaaccgcctgttgaagtgcttctaagctggtgaaaaaaggaatgacgctggtgccgtcttctttttcccagtgctgtaaatcaagcgcgctatcttcaaccacagcctcgccctgcgccgccgtaccaggcacccagacggtggattccagtagagtacggaaaaaggccgggcggtgcgccggttcagttgctgctttttccagcaggtcttcaagttcgttttttgtttcggacataagaaccacaattcattcaacgttcggggcgcaaatgcctgatgcgctacgcttatcaggcctacaagggattcgcaatttgttgaatttgcagaatttgtaggccggataaggcgtttacgccgcatccggcatattagtttacgccgttaacagattagctatcgtgcgcacaccaagtcccgtagcgcccgcagaccactgttcaaccggcgctttacggtaagtcgcgctgcagtcgatatgcagccagccttgctgatagttctcaacaaagtggctcaggaagcccgccgccgtgctcgcgcctgccggatacgccgcgcttccggtattgttcagttcggcaaagttagacggcagctggctgcggtggaactccgccagcggcagacgccagaacggttcgttctcctgcgcggcactcgccagcaagcgaccggccagcgcatcgtcaaaactgaacagcgcgtgataatcattacccagcgcagttttcgccgccccggtgagggtcgccgcatcaatgatcatttccggtttctgcgcactggcatcaatcagaccatcggcaagcaccagacgcccttcggcatcagtgttcatcacttcaacttttttaccgttgcgataggtgatgatatcgcccagcttgaacgcattgccgctaatcaggttatccgcacagcagaggaacagcttcacgcgcttgttcagtccgcgcgtaatggcaaatgccagcgccccggtaaccgttgccgcgccgcccatgtcgctcttcatgctgtccataaacgcagtctgtttgatgctgtagccgccggagtcaaaagtgatacctttacctaccaggcacgcgtacactggcgcttctttatcgccagttgggttgtaatccagcgccagcaataccggagaacgttcactaccgcgtccgactgtgtgcagccccatataaccttgctcacgcagatcttcgcctttggtgatccgataagtcacacgatcgcccgcgacgttgctgatcagatcaacagcacgctgtgccagttggcttggtcccaattcttctgccggtgcgttgatggtgtcacgcacccagtcgatgatcatcaggcggttatccagttcctggcgctgggcatcgtccagatccggccacaccactttacgcgtgcctttcggggctttgtaaccttgccagaatgcccagcagcgatccgcatcccagccttcaccgcttaactgaacatgcttgatgcccagaccgtcaatcttgcgcgccgcacgctggatcagccccagatcgtctgccccgttcaaatgcagggtaatgccgtcattattaatgctgtaagttgctttttctccccagcgcgcgtcggcaggttgggtagagagggtaatcttcatcgcttctgtcattttagttatccttctttgtaaaagggccgccagttggcagccccaggatttttccgctaaatgattcgcgttgcaggaaggcggcaagtgagtgaagccccaggagcatagataactatgtgactggggtgaacgagcgcagccaacgcatctgcggcgtgaagcatgacgcggaaattattcggcctcgtccagccagactaacaaaatcgcttcgaggattttctcgttggatgcctgcgggtcgtcgtcgaaatcttccagatcgcaaatccactgatgcatatcggtgaatcgaaccgttttcggatcaagatcgggatacgcatcgtacagtgcttcgccaatttcgcggctatcggtccacttaagtcccatactaacctctgttaatgctcacgcgcatggttgatagtgtaacgcgggatttcgactactaaatcttcgtcggtaacgcgcgcctggcagcttaaacggctttccggctccagtccccaggctttgtccagcatgtcgtcttcctgctcactgctttccggcagactgtcaaaaccttcacgaacgatgcagtggcaggtggtgcaagcacaggatttttcacaggcgtgttcaatctcgataccgttacgcagagctgcgtcgagaatggtttcaccgctattagcttccagaacagcgccatcagggcagagatcctgatgaggcaaaataacaatctttggcatattaaacctcgtccacggaatggcctttcagcgcacgacgaacgctctggtccatgcggcgagcggcgaaatcctgggtttgtttgtctacgtttttaatcgcttgttcgatggcgtcaacatcatcgccctgcgccacttcactcaggtgagcggcagcatcgtcaatgacctgacgttctgcggcgcttaacagcgcggcatcagcagccagcgcgccgtgcagactttccagcacacgcgccgcttctactttttgttctgccagcattcgggcttttacgtcctgctcggcatagctcatactgtctttgatcatgctagcgatttcgctatcggtcagaccgtaagacggtttgacctgaatagacgcctcaacgccggtggatttctccatcgccgtcacgctcaaaagaccgtcggcatcgacctggaacgtcacgcgaatatgcgcaccgccagccggtagcgccggaataccacgcagcgcaaaacgcgccagactgcggcagtcctgcaccagttcgcgctcaccctgcattacatggatagacatcgccgtctgaccatctttaaaggtggtgaaatcctgagcgcgggccaccggaatagtggtattacgcggaatcactttctccaccaggccgcccatcgtttcgaggcccaggctcagtgggatcacatcaagcaacagcatttcgctgtctggcttgttacccaccagaatatccgcctgaatcgccgcgccaatagcgacgactttatccgggtcgatggaagtcagcggtggacgaccgaaaaattcgcctacccgttcacgcaccagcggcacgcgagtagaaccgcccaccatcaccacttccagcacttcatcagcttctacacccgcgtctttcagcgcgcgacgacaagccagtaaggttcgttttaccagtggcgcgatcagttcattgaattgttcacggctgatttcgccctgccagcccgcaacgttaacggtcacggagtccgcatcgctcagcgcgattttggctgcaatggcggcatccagcagttcacgctgaacgcggttatcgctacgatcaggaatgcccgcctgctcgcgaatgtaatccgccagcagatggtcgaaatcatcgccgccgagcgcggaatcaccgccggttgccagcacttcaaacacgccgcgacttaagcgcagaatggaaatatcaaacgtcccgccaccgaggtcataaacggcgatcacgccttcctgaccggaatccagcccgtaggcgatagccgcagcggtcggttcgttaagtaagcgcaggacgtgaaggcccgccagacgcgccgcgtctttggtgccctgacgctgggcatcgtcaaagtacgccggaacggtgataactacaccatccagctcgcctgccagggcttcagttgcccgcgccgccagtgctttgaggatgtccgcagaaacgcgcaccgggttcagcagccccgccgccgtttcaatcatcggcaggccgttttcgctggcctggaattgataaggcagatgcggatagcgttgctggatatcagccaggctgcgtcccatcaggcgtttaacagaactaattgtgttggcggtatcgagcgctgcattagtacgcgcgtcataacccacgctatgcccttgctgttgatagtgaacaacagatggcagcaggtgacggccttcatgatcggctaacgtttcggcctgaccgctgcgcactgtcgccaccaggctgttggttgtgcccaggtcaataccggccgccagacgacgctgatgcggcgcagcactcaaaccaggttcactaatttgtaataaggccatgtttagcttccagaaattaaaaatcgagcagtttttcttcgagttgttcggcactgcttcgcagtttatcgagaaaacgcagcttacgcacggtatccgccgccgcgtcccacgtctcgttgtctaactgttcaaccatcaactgatggcgggtatcaaacatctttttcacacgtttgataaagctttccagccgcgcttcatctttcgcctgttcgatctcgtccagctcttcgcgcagctccaactgttccatcaggaacgcggtgtcgcgcacagtatgctgctcgctggcgagatcaaagccgtgcaaagaaagcaaatattccgcgcgcattaacggatgacgcagcgtttgccaggcctggttaatggttgcagattgctgtacggcggcgagttgttccgcctggcttccgctggcgaatttatcaggatgatactgacgttgtagatcctgaaaacgcaggctcagcgcctgggtatcgagttgatagcgggcaggcaagccaaagagggtgaagtaatccataacattctcagggctgcgatccgccgcgataacggcgaatcaggtaaaacaaaccccacgcgcaggcgaccacggtggggttatcggtatgcgcatcaaacgtggaagctttcgccgcaaccacactcatctttgacgttcgggttggtgaatttaaacccttcgttcaggccttcttttacgaagtccagctgcgtaccgtccagaaattgcaggctcttgccatcgaccacgactttcacgcctttgtcttcaaacacgatgtcttccggcgtcggttcgtcaacaaattccagtacataagccataccactacacccggaggttctcacgcccagacgcaggccaaaccctttaccgcggttagccagaaaggtatttactcgcgctgctgcactgtcgctcagtgtaatgctcataaccaaacctcaactcttattttgcttcacgtttgcttttatagtccgcaatggcggctttgatcgcgtcttctgccagaatagaacagtgaattttcaccggcggcagttcaagttcttcagcaatatcggtgtttttgatcgcctgcgcttcgtcgagagacttccctttcacccattcggtgaccagggagctggaagcgatagcggaaccgcagccgtaagttttaaaacgcgcgtcttcaatgataccttcatcgttgactttaatctgcaacttcatcacgtcgccacaggccggtgcccccaccatgccgctgccgacgttctcgtcgttgttgtcaaaggaacccacgttacgcggattctcgtaatggtcgataactttttcgctgtaagccattataaattctcctgattccgataccgattaatgatgagcccattcgatgctgttcagatccacgccctgcttgtacatttcccacagcggagaaaggtcacgcagacgaccgatggatttacgaactaactcgatggtgtagtcgatctcttcttcagtagtaaaacgacctaaagagaaacggatagagctatgtgccagctcgtcgttcagccccagcgcgcgcagcacgtaggacggttcgaggcttgcactcgtacaggcggaaccactagaaactgcgaggtctttcagcgccataatcaggctctcaccttcaacgtagttgaagctgacgttgagaatgttcggcgcaccgtgttccaggtcaccgttcaggtaaacttcttcgatatctttgatgccgttccacagacggttacgcaggccgcgcagacgttccatctcggtcgccatctcttcttttgcgatgcgataggcctcgcccattccgacgatctggtgaacaggcagagtgccggaacgcataccgcgctcgtgaccgccgccgtgcatttgcgcttcgatgcgtacgcgcggtttacgacgtacatacagcgcaccgatacctttcgggccatagattttgtgaccggagaaagacatcaggtcaactttcaactggctcaggtcgataggcagtttacccacgctctgggttgcatcaacgtgatagataatgccacgagcacggcacatttcgccgatagccgcgatatcctgcaccacgccgatttcgttatttacgtgcatgatggacacgaggatggtgtcgtcacgcatcgctgcttcaagttctttcaggtcgataatgccgttacgctgcggtgccaggtaggtgacttcaaaaccttcgcgctccagctgacggcaggtatccagtaccgctttgtgttcggttttgctggtgatgatgtgcttgccttttttctgataaaagttggctgcacctttgatcgccaggttgtcagattcggttgcaccagaggtaaagacgatttcacgcggatcagcgccgaccagatcggcaatctgattacgggcgatatctaccgcttcttcagcctgccagccgaaacggtgagaacgggaggccgggttaccaaaggttccgtccatcgtcataaactgcatcattttctcggcaacacgcgggtccaccggcgtggttgcggagtagtcgagataaatcggtaatttcattgctctataaactccgtacatcactcaatgcaaggaatcaggctaccggctggatgtacgaccgtgtttacggagtatttagcactccggcctgattctgaattctttttattaagcgcgtaacttaacgtcgatcgcgtcttgtgtgcgggtgcgtggcgcgtcgtgagtatgctgacgaccagacacatccagcacttcctggttattaaccagttcgcctaaagtaatgttgttgagaaaaccggtgagacggtcgctcaaatcacgccacagcgcgtgggtcaggcatttatcgccgccctggcagccgcctttaccctgacaacgggtggcatctacagattcgtcaacggcgctaattacttcgccaacggcgatgctgctggcatctttgcctaacagataaccaccgcctggtccacgtacgctggaaaccagaccatttttacgcagacgggaaaacagttgttccagataagaaagggaaattccctgacgttcggaaatatcagccaacggtaccgggcccgcttcagagttgagcgcaacgtcaagcattgcggtcacggcatagcgccctttagatgtcagtctcatgtcttacttcacctcaaactcgcccctgcccggggttttttattgtaaaagtgggggtattgcatagcagggtcaagtctgacattcccgagtaaattggtcaactatttacttgactgatttagtcgggtatttaaccttcagtgccatttttttatcgtggcgtttgtacctgttgtcggatgcggcgtgaacgccatatccgccctggggttctgtacactgtaggcctgataagacgcattacgcgtcgcatcaggcaacggctgtcggatgcggcgtgaacgccttatccgacctacggttctgttcactgtaggcctgataagacgcattacgcgtcgcatcaggcaacggctgtcggatgcggcgtgaacgccttatccgacctacggttctgttcactgtaggcctgataagacgcattacgcgtcgcatcaggcaacggctgttattcggccttgttacctttattctgctgctcaatagaagccagaatcccgcgcaggatattcaactcctggctttccgggcgcgcacgggtaaacagacggcgcaatttattcatcacctgccccggatggttttcacggataaaaccggttgccagcagcgtttgttccagatgaccataaaaacgctccagatcatcgaccagcggatacggcgtctcttcatgctcgacctgctcgccgttttcctgagttgccagccaggccatgcgcacttcataggcaataacctgaaccgccatcgccaggttcaggctgctgtattccgggttagccgcaatcgcgacatgataatggcatttctgcaactcttcattggtcaagccgacgcgctcgcgaccaaacaccagcgccaccggggtatttgccgcttcagcgacgcttttcaggccgcattcgcgcgggtcgagcatcggccatggcagcgtgcgggaacgtgcgctggtgcccaccaccaggctacaaccggctaacgcttcgtcgagcgtatcgacgatgtgagcattaccaatcacatcgctggcccctgctgccagggcaatcgcctgggagtcgggtttcaccagtggattaaccagccacagattggttaatcccattgttttcatggcacgggcaacagaacccatattgccggtgtgactcgtctccaccagcacaattcgaatattttgcagcattgtctttcttcatctaaagattattcacgcatcttatcataaaacgaagacagatgccgatctcgctgctatactctgcgccgttttcccgttctttaacatccagtgagagagaccgatgcatccgatgctgaacatcgccgtgcgcgcagcgcgcaaggcgggtaatttaattgccaaaaactatgaaaccccggacgctgtagaagcgagccagaaaggcagtaacgatttcgtgaccaacgtagataaagctgccgaagcggtgattatcgacacgattcgtaaatcttacccacagcacaccatcatcaccgaagaaagcggtgaacttgaaggtactgatcaggatgttcaatgggttatcgatccactggatggcactaccaactttatcaaacgtctgccgcacttcgcggtatctatcgctgttcgtatcaaaggccgcaccgaagttgctgtggtatacgatcctatgcgtaacgaactgttcaccgccactcgcggtcagggcgcacagctgaacggctaccgactgcgcggcagcaccgctcgcgatctcgacggtactattctggcgaccggcttcccgttcaaagcaaaacagtacgccactacctacatcaacatcgtcggcaaactgttcaacgaatgtgcagacttccgtcgtaccggttctgcggcgctggatctggcttacgtcgctgcgggtcgtgttgacggtttctttgaaatcggtctgcgcccgtgggacttcgccgcaggcgagctgctggttcgtgaagcgggcggcatcgtcagcgacttcaccggtggtcataactacatgctgaccggtaacatcgttgctggtaacccgcgcgttgttaaagccatgctggcgaacatgcgtgacgagttaagcgacgctctgaagcgttaatgactcaggcgggtgatatcactcacccgccctcgcctttcaggcgctattccgaaatacttcctcactgctttactttctttcgtcactctcccaccatctttccccgattaatggatgataaagaagagccaaggaaaggttatggcactgccagtgaacaaacgcgttcccaaaattctgtttattctctttgttgttgccttctgcgtttatttagtgccgcgcgttgccatcaacttcttctattatcccgacgataaaatttacggtcccgatccctggagcgcggaatccgtcgaatttacggctaaggacggtactcgtctgcaaggctggtttatcccttctagcacgggccctgctgacaacgccatcgcaaccatcattcatgctcacggcaatgccggaaatatgtccgcccactggccgctggtcagttggttacccgagcgtaatttcaacgtttttatgtttgattatcgcgggtttggtaaaagtaaaggcacgccgtcccaggccggattgctggacgatacgcaaagtgccatcaatgtggtgcgccatcgcagtgatgtaaacccacaacgtctggtgctgttcgggcagagtattggcggggcgaatattctggatgttattggtcggggtgatcgtgaaggcatacgtgcggtgatcctcgactccacatttgcctcttatgcaaccatcgccaaccaaatgatccccggcagtggctacttacttgatgagagttacagcggcgaaaattatatcgccagcgtcagcccgatcccgcttttactcattcacggtaaagctgatcacgttatcccatggcagcacagcgaaaagttgtatagcctggcaaaagagccaaaacggttgatcctaatcccggatggcgaacacattgatgctttttccgatcgtcacggcgatgtttatcgcgaacagatggtggactttatccttagcgcgttgaatccgcagaactaacccatgatcgctagcacgataatcattcacaaaaccaccttaagacatgctaatccactggtcagaacagtttaagatgagaaaaattctgtgacgcttgccaacatttctgatgattagcattcccttcgccatttccttgagcaaactttagctattcttatcaattatgcttatgggagatctacagatgatgcctacgcttgctccaccatctgtccttagcgctccccagcgccgctgccagatcttgctgacgctctttcagccggggttgaccgccaccatggcaaccttcagcgagcttaatggtgtggatgatgatattgccagtcttgatatcagcgaaacaggacgggagatcctgcgctatcatcaactcacactgacgactggttatgacggtagctaccgggttgaaggtacagtgcttaaccaacgtttgtgtttatttcactggctacgacgtggtttccgtctgtgtccgagttttattaccagccaattcacccccgccctgaagagtgaactgaagcggcgcggaattgcgcgtaacttttacgacgataccaatctacaagcgttagtgaatctctgctcccgacggctgcaaaaacgctttgaaagccgcgatattcatttcctgtgtctgtatctgcaatattgtttgctgcagcaccacgctggaattacgcctcagtttaatccgctccaacgtcgctgggcggaatcctgccttgaatttcaggtagcgcaggaaattggacgccactggcagcgtcgggcgctccagcctgtaccacctgatgagccactgtttatggcactacttttttccatgttgcgggttcccgatccattgcgggatgcgcatcagcgggacagacaattgcgtcagtctatcaaacgtctggtaaaccattttcgtgagctgggaaatgttcgtttttatgatgaacaggggttatgtgatcagctttatacccacctcgcccaggcgttaaatcgcagtttgtttgccatcggtattgataataccctgccggaagagttcgccagactgtacccacgcctggtgcgcaccacccgcgcggcgctggccggatttgaaagtgaatacggcgtccatctttctgatgaggaaagtggtctggtcgcggtgattttcggtgcctggctaatgcaggaaaacgatctgcatgaaaaacagattattcttcttaccgggaatgatagcgagcgagaagcgcagattgagcagcagttacgcgaactaacgttactgccgctcaacattaagcatatgagcgtaaaggcatttttgcagacaggcgctccgcgtggcgcggcactgattattgcgccttataccatgccattaccgctctttagtccaccgctgatctatacggacctgacgctgacaacacatcaacaggagcagatccgcaaaatgctcgaaagtgcatgatcagcaactgggaacaactttcgggcgcaaaaacattgccggaagcgccaccagcgccattacccagaacacgccgtggcccagatattgatacaggaaaccggcgaaaacggtcatgatagcgatactgccgcccatcgcgacggcagagtaaaccgcctgtaaacggatgacttcgctaccctggcgagcagcaatataacgcatggcggccaggtggcagaccgtgaaggtgccgcaatgcagaatttgcaccactatcaaccacggcaacgccgtagttgctcccataatgccccagcgcactacgccgcaaatcgcgctgatcaacagcatatcgcgtgcactacaacggcggaaaagtttattactcagcgcaaagataatgacttccgccaccacgcccaggctccacaaataccccaccgcgctggcgctgtagccagctgcctgccagtaaatggcgctaaaaccgtaataggccgcatgtgccccctgcaataaacaaacgcaggccagaaagcgccagttctggcgaaccagcgccaaccacgcagaccaaccggtgctctcctgctggcgacttgccccttgtggctgaatcgtcggacggatgagaaagccgagcagcatggatgccacgcccaacgtcaacagcgcgaggatcacccgataatcaaacatagtgaccagtttgcccgtcagcgcgctgccaatgacaaacgccacgctgccccacagtcgcactttgccgtaatcaagcgggaactgcttttgccacgtattcgccagtgcatcggtcaacggtaccagtggactgaaaaagaggttaaagccaatcatcaccagcatcagccacgctacgtgcgcccccgcccagaaggcgacagcaaagagaagtgtcagcagtgccagcacgcgcaaggcggaaatcaggcgggaaggatcgctgacgcggggcgcgatgagcaaactcccgaggaaacgggcaaccagacctgcccccaataacaggccgatggtttctggcgttaaaccaatccctttaagccagacgctccagaaaggtagaaaaatgccgtaactaaaaaagtatgtgaaatagccgagcgccaaccagcgcgtggattgcaaaaccatgagtccctcccgtcaggaggcgttagtctggggttaatcgaatgttggtgcaagttgaaaaataagaatattcgagcctgcttcccgatgtctgtaacgccagttcacaagcactaaaaaactgagatccgcgacgcatgttgcaaaaataatgcgtaattatgccgttacgcttgccaaacgttcctgcacaatggcgatgaaatcgcgtaatgccggcttcatctcccctttcttccacgccatcagtaaagcaatggaaggcacatttccggcaatgggacgaaaaacaacctgtccggtattaaaattattcatataaccgggtatcaaagtgacgcccagccccatgcccaccagattcatggtcaccagaatattcgttgccacctggacgatatttggctggctgttttcttgcgcaaaccacgctttaacgatcggcgcaaggctaccggaatacaccggatcggtactgacgaaattcacgccatccagttgcgcggcggtgatctctttttcatgtgctaaagggtgatcaaccggtaacacaaccactaatggttcgtcaaaaagctccagataatcaatctccgggctataaacaggatggcgcattaagccgacgtcgagttcaccacggcgaattttttcctcctgttgcgtggtgattaaactcaccagctcaatcaaggtgtctggctgtctgagacgaaacatcggtaatacttttggcagtaaattcacttccgcgcttggcacaaagccaatggttaattgtctgtcttcctgaacaattttccgcgcccgtaatttggcattttccgcttgttcgaggattgccagcgcgtcctggagaaaacattctcccgccgccgtcaacgcgactttgcgcttatccctcaccagtaacggaacaccgacacagttttcaagatcgcggatctggctgcttaagctaggctgactggtatgcagtttttccgccgcacgggtaaagttcagtgcctgcgccactgcgacgaaatagcgtaaatgccgtagttccatcaccttccccttgttatcgaaaaaacgtctcagctggtagaaattaactatttcacatattagcaaccaaccagcaacatccttatggcacaaaaatagaaggtcaatacatcttatctttcaggattaaaaaatatgaccacacccagtgatttgaacatttaccaactgattgacacccaaaatggtcgggtcactccgcgtatttataccgacccggatatttaccaactggagcttgagcgtattttcggtcgttgctggctatttctcgcccacgaaagccagatcccaaaacccggtgatttctttaacacctacatgggagaagatgcggttgtcgtagtgcgtcagaaagacggcagcatcaaggcgtttctcaaccaatgccgccaccgggccatgcgtgtgagttatgcagattgcggcaacactcgcgcctttacctgcccgtatcacggctggtcttatggcattaacggcgagttgatcgatgtaccgctggaacctcgcgcctacccacaagggttgtgtaaatcccactggggactaaacgaagttccttgtgtggagagttataaagggctaatttttggcaactgggataccagcgcaccgggcctgcgtgattacctgggtgacattgcctggtatctggatggcatgctggatcgtcgcgaaggcggcaccgaaattgtcggcggcgtacaaaagtgggtgatcaactgtaactggaaattcccggcagagcagttcgccagtgaccagtatcatgctctgttcagccatgcttctgccgttcaggtattaggggcgaaagatgatggcagcgataagcgcctcggtgatggacaaaccgcccgcccggtgtgggaaaccgccaaagatgcgctgcaatttggtcaggacggtcacggtagcggtttcttctttactgaaaaaccggatgctaatgtctgggtcgatggcgcagttagtagctattaccgcgaaacctatgccgaagcagaacaacgtttaggtgaagttcgcgccctgcgcctggcgggtcataacaatattttccccacgcttagttggctaaacggcactgccacactccgcgtctggcatccgcgcggccctgatcaagttgaagtgtgggcgttctgtattactgacaaagccgcctccgatgaagttaaagccgcttttgaaaacagcgccactcgtgcttttggtcctgctggttttctcgagcaggatgacagcgagaactggtgtgaaatccagaaattgcttaaaggccaccgcgcccgcaacagcaaactgtgtctggaaatggggcttggtcaggaaaagcgccgcgacgacggcattcctggcattactaactatatctttagtgaaactgccgctcgtggaatgtaccaacgctgggccgatcttctgagtagcgaaagctggcaggaagtgctcgataaaaccgccgcttaccagcaggaggtgatgaaatgagtgcgcaagttagtctagagttacatcaccgcattagccagtttctctttcacgaagccagcttactggacgactggaaatttcgtgactggctggcgcagctcgacgaagagattcgttacaccatgcgcaccacagttaacgcgcaaacacgcgaccgccgcaaaggcgtccagccaccgacaacctggatttttaatgacaccaaagaccagctggagcggcgaatcgcccgtctggaaacgggcatggcctgggcagaagagccgccgagtcgcacccgtcacttaatcagcaactgccagataagcgaaaccgacatcccaaacgtatttgctgtgcgggtaaattatctgctttatcgggcacaaaaagagcgcgatgaaacattctatgttggaacgcgtttcgacaaagttcgccgtctggaagatgacaactggcgcttgctggaacgggatatcgtcctggatcaagcggtaatcacttcccataacctgagtgtactgttctgatgaatcgaatttatgcgtgtcccgttgcggatgtgccggagggtgaggctctccggatcgataccagccccgtcatcgccctgttcaacgttggcggcgagttttatgccattaacgatcgttgcagccatggtaatgcgagtatgagtgaagggtatctggaagatgacgccacggtggagtgcccgctacacgccgccagtttttgcctgaaaacggggaaagcgttatgcctgcccgccaccgatccgctcaccacttatccagtacacgttgaaggtggtgacattttcatcgacttaccggaggcgcagccatgagcgatctgcataacgagtccatttttattaccggcggcggaagcggattagggctggcgctggtcgagcgatttatcgaagaaggcgcgcaggttgccacgctggaactgagcgcggcaaaagtcgccagtctgcgtcagcgatttggcgaacatattctggcggtggaaggtaacgtgacctgttatgccgattatcaacgcgcggtcgatcagatcctgactcgttccggcaagctggattgttttatcggcaatgcaggcatctgggatcacaatgccagtctggttaatactcccgcagagacgctcgaaaccggcttccacgagctgtttaacgtcaatgttctcggttacctgctgggcgcaaaagcctgcgctccggcgttaatcgccagtgaaggcagcatgattttcacactgagtaatgccgcctggtatcctggcggcggtggcccgctgtacaccgccagtaaacatgccgcaaccggacttattcgccaactggcttatgaactggcaccgaaagtgcgggtgaatggcgtcggcccgtgtggtatggccagcgacctgcgcggcccacaggcgctcgggcaaagtgaaaccagcataatgcagtctctgacgccggagaaaattgccgccattttaccgctgcaatttttcccgcaaccggcggattttacggggccgtatgtgatgttgacaagccggcgcaataatcgcgcattaagcggtgtgatgatcaacgctgatgcgggtttagcgattcgcggcattcgccacgtagcggctgggctggatctttaaggaagcacgatgaaagaaaaaacgatcattattgtcggtggcgggcaagcggcggcaatggctgcggccagcctacgccagcaagggttcaccggtgagctgcatctgttttccgatgagcgacatcttccttatgaacgacctccactcagcaaatccatgttgctggaagattccccgcagttacagcaggtgttacccgctaactggtggcaggaaaacaatgttcatctgcattccggtgtaaccatcaaaacgctgggtcgcgacacacgagagttagtgttaaccaacggcgaaagctggcactgggatcagctttttatagcaaccggcgcggcagctcgaccgctgccgttgcttgatgcactgggagaacgctgctttaccctacgccatgccggtgatgccgccagactgcgagaagttctgcagcccgaacggagtgtcgtgattatcggtgccggaactattggtctggaactggctgccagcgccacgcagcgcagatgtaaggtgacagtgattgaactggcggcaaccgtcatgggccgtaatgcaccaccgcccgtgcaacgctatcttttacagcgccaccagcaggctggtgtgcgcattctgctcaataatgccattgaacatgtggtcgatggtgaaaaagtagaactgacgctgcaaagtggggaaacgcttcaggctgatgtggtgatttacggtattggtatcagcgccaacgagcaactggctcgcgaggccaaccttgatactgccaatggcattgtcattgatgaggcttgccgcacctgcgatcccgcgatctttgccggtggcgatgtggcaatcactcgtcttgataatggtgcactacaccgctgcgaaagctgggaaaacgccaataaccaggcgcaaattgccgctgccgcaatgttagggctaccgctaccgctactgccgccgccgtggttctggagcgatcagtacagtgataacttacagtttattggcgatatgcgtggcgatgactggctttgtcgtggcaacccggaaactcagaaggcgatttggtttaatctgcaaaacggcgtgcttatcggtgcggtcacgctgaatcaggggcgtgagattcgcccaattcgcaaatggatccagagcggcaaaacgtttgatgcgaaactgctgatagatgagaacatcgcgcttaaaagtctgtaaccaggataattagcgaatatctcaatgcctggggcgtggcgaggtgcaagagtgtgtattacgtttaaaagtcattatcttgcaaagggattggttatgaacacactacgttattttgattttggagctgcccgccccgttttgttattaattgcccgtatcgccgtggtcttaattttcattatttttggttttcccaaaatgatgggctttgacggtacggtccaatatatggccagcttgggcgcgccaatgccgatgctggcagcgattattgcggtagttatggaagtgcccgccgcgatattaatcgtgcttggctttttcacccgtccgctggcggtgctgtttattttctacacgctgggtacggcggtgattggtcaccattactgggatatgaccggcgatgcggttgggccaaatatgattaatttctggaagaatgtcagtatcgctggcgcgttcttgctattggcaattaccgggccgggggcaatttctctcgatcggcgttaagaaagatgccggatgcggcgtgaacgccttatccggcatttaataaattacagccactctacccgcaagctcatctcactagttgtactttcccctggtgctagcgcaatgagatcacccccttccgggcgatgatgatcatccggcgcatggctcatcggttccagacagaagaaatcaaacgcatatcctttatcaaacgcagggtcggaaacaaagatgaaataacacggtgcaggtggcgtcgtttccatgatgatggcataaccttcctgcggctgctcgatgcgggcctgaccattccatccggcaaaaccattgttcacccactggcgcggcaacggcgcgggctggttaaaatccagttcctgcggtagctgctcgcaaaactcacccgccagccactgctcccgctccagccagtaaccgctcgcctgtgcctgaatccgcgtttgcgggctcaacggaaaataaggatgccagccggtaccaaatggcagcgtctctgccccttgattggtgacagagagcgtcaccgtcagcgtatccgccgttaaatgaaacgcctgacttacccgatagtgatagacaccgctgcgatgttcatacaccagacacaaactatcatcgctgtggctgacacattgccactcgcccagccagccatcgccgtgtagatagtgcgcatcccactcaacattcggttgcagttgatactcacgcccctgccagacaaaacgattgccgctcacccggtttgcaaatggcaccagcggaaaacaactggcatcggttgccacaccgctttttttaccaggacgtaagagcggcgtcgtatcgcgccagaagccttcgattacgccgccctggtcagaaacgtccagctttaggctcccgtgggataaggtatagatggtcatccgctaactccttaatccgggaagttaatcacaactttcccgcatttgccgctcgccatcagcgcataggcatcacctgcctgttccaggctgaagcgatgggtaatggcgttacgcggccacagcttccagtccgtcagatcatgggcgcatttttccatatggaacagactggtcacccaggagccgataatccgccgttgatggtgcatcagatcggcgctgacctcgaattccacttttccggtttcaccaatgtaaaccacccgtccccagtcagcggtggattgcagtgccagcaagcgacctgcggcattaccggaacaatcgagcgcaacatccgcgccaccgtgggtgagttcggcgataatctgcggcagaccttcggtggttgctaaatagccgtgatccatcacccctaactgttttgccatcgccagacgttccggcagcatatcaacgccgatgatccgttttgcaccgcgacctttcgccagcatcatcgccatcatgccgactggccccagaccgaccaccagcacgttatcactgccggaaacttcgccgcgcaaaattccttcatacgctgtaccaacgccgcaactgataaacgcaccatcttcgtagctcagcgcatccggcaggaggatcagatctttttcttccgccagcaagtattcggcatgaccgccgtcacgctgccagccgtaagccgcttttccttcgccagtacaagaaataggaaaaccgcgacggcagttcgggcaaaaaccacagccagaaatgtgatacaccagcacgcggtcgccctctttaaaatggcggcagccttgccccatcgccacaatctgcccgcacggttcatgaccgttgataaagccctggtataacggtttatcgggtgccgccgctgtggcacggtgttgatgatagatatagtggacatcgcttccgcaaatcccggaggatttcattttgatcagtacctggttaatccccggcgtcggcaccgcaacttcccgcagatcgacggtgctatttcctggtaaataagctgccagcatcgttttcataaatccctcattaacaatacgattaattttcatccctgccgcacccgcgccaggggcgttaaggtttagcgtttcgctttactgcttcgctgggtcagcaagatattcgccagcaccgccaccacgatgatgacgccgcgtaccacctgctggaaaaaggagttaataccgagcagcaccagaccgttaccgattagcgtaatcaccagcacaccaagcaatgtaccgaacagggaaccgcgaccgccggaaagtgccgtaccgccgaccacgaccgcggcgatgacgtcaaactccagaccgtttgcggcacctgcgttaccagaaccgaggcgcgccgccaacaaaatgccggtcaccgccgctaataatccgctaagggtaaagataagaatgcgcacccgacgaacgttgatgccgcacaactgcgccgccgtagcattaccgccaacggcaaaaacgctgcgcccgaaggcggttttgcggctgatgaacacaaacagcgcaaacaacacaatcatgatcagcgcggataccggcacaccgagaaattgtccgcccagccagtccagcacctcgttttcatcaatcggcactggcagtgcgttcgtcataaacagccccattccgcgcagggcgctccacagccccagtgtggcaacgaaacttggtacattaaacacgccgcgcagcaccccggccagcgttcccatcagcgcgcctaacagcaacaccagcaggcacgccaccgccagcggaacttcaaattgcagcaaaaatgccaggcacacgctgacaaaagccaccatcggcccaacgctgacatcaatttcaccggagataataatcagcgtcatcgcccaggcggcaatcccaatggtggcggcatcgcgcagcacgttcatctggttattcaaactgataaagccaggcgcgttcagggagaagaccagataaagaatggcaatcaccaccagcaaaccgatctcattaatatggcgactgacaaattgtttgaggctgacgctcttgccctgcggcaatggtaaactgctagcagacatcttcaggttcctcggtaaaattcatcagtgcacagacagaatggcggacatcagctcatccacattgaccggagcgtgaaactcctggctgaacgtgccgtgctgtaataacaggatgcggtcacacaccagcggcaactcctccacttcactggagataaacaccacgctttttccttcggcagccagctcacggacaatacggtaaatctgctgtttggcttcgatatcgacgccgcgcgttggctcgtcgagcaacaaaatctggctggcagcatagacccaacgaccgatcaccactttttgctgattgccaccagaaagcgtgccgatgggtgtttcgctactggcggccttgaccgtcatccgctgcatcacctcttcggtcaggcggcggatggtggaccattgcagcacaccgttggcgctgattttttgccgattggtcagcactgtattttcgtcaacgcccaaccagggaatgatccccgcttctttgcggttttctggcgtatagccaatgccgcgtttcagcatgtcgccgtaatcggggcgcgtgattttctcgccgttgataacaatttcgccctgttcatactcctccagcccaacaatcgccttcagcaattcactgcgccctgcccccagcagaccagcaatgccgagcacttcgccacgacgtagcgtaaaactgatatcctccagcttgggcttatggcgtaacgcacggacttccagcacggcctgatccacaatttcctgaggggctaccggcgcaatatcaacgtgatcgcgcccgagcatcaggctcacaatatgatgcgtggaggtgttttcgagcatcacatcgcccgccacctgaccatcgcgcataacggtggcacaggaggcaatgcggcgaatttcttccatccggtggctgacataaatcaccgccacgcccagtgcgctcatctttttcaccgcgctgatcaccagttcaacttccgcactcgcaaggctactggtaggttcatcaagaatgaccacgcgcggctcgcccttcatcacccgcgcaatttccaccagctgcttttgcgccgggcttagcgtactaacaagttgttcaggactaacgtcaacgcccagcgcctgtaagcaacgttgggcatcctgcgccatttgcaggtaatcaatcatgccgttgcggcggggccactgaccgaggcagaggttttccgccactgtcagcccttccaccagacttaactcctgataaaccgcgcgcacccccagttcagcggcacggcgagtcagcgtagcttcgtcaccttccagtcgcgtctcgccaatccagatatcaccgctatccgggcgttcgctgccggtaagcattcgaatgagagtgcttttgcccgcgccgtttttacctaacagcgcacgaacttcgcctttattgagcgtgaagttaacgttatccagcgcaacgacgccgggataacgcttatttcctgccaccacttttgctaccgggactgcctctgttgccgtgaacatagggacctctgcgaatcagcgattagggcagaccatcaacgtgcgttgccagccactgtttaccgtcttccgttttggtatagagatcgataggcacctgaatcactttttcaccgtcggcttgtttattgataaccttcaatgtttgcgcgaaaacagcattgcccattttcttaccggaaatatccactaccgctttcagcacctgattgttttccagctcctgagcaatttcggttgtcatatcgctaccgaaaacagcaatttttccggcctgattttgattacgtaccgcttttaccgcgccgagtgtcgcaccgccgctttcccccataatggcgttgagatccggcgtggagataattagtttttcaccaacggaaatcgctttatctaaaacagtcccttcctgattagcgacaatttgcgcgccgggaacgcgggattttaaaacttcttcaaatcctttacgtcgctgcacacaaacttcaaaggcttcgcaattgatgacggcaattttcggctggtcaattttattggcaataaaataatcagcggcagcgttacccagttttttaccaaattccagcggatcgccgaccagatacgcgctgacatatttatcgacccccttttgattaatacaggtgttgtagcaaatcaccggaatgcccgcttcactggcgcgacgaacggtacggctactgccattttcagacactgcgcttaaaataatggcatcgacattacgcgccacgagggtatcaacaaaggtactttctttgctaatatcaccctgggcgttagtttctattaactgaacttgtacactggaatcttttgccgcatcctgaacgccctgacgcactccagcgtagtatccctgagtatcaaggtatattgcgccaatggtcatttctttttccgcagccctggcaaatagtgcgctacctaatagcgtagccattaataatagattacgggttgttctcatttttgtaggcatagagcctcctgtagggtttttattaacaacggcttattctaattattttgtgatgagcggcagcgcgtgccgctcaaatattacagttaatagggtttagtgaacgcggttaaaaataaaaggcatcacggtggtgaataatgccgctttcggccaagccggattaatcgccgtcaattcagcgcgagcagactcatattgcgcaacctccccgagtcccgcggacgccagcatcgccaccatcaggcatttttctttatgctgctgttgtaaatcgccatacaggctcaacaagtcaggttggctgacggcaaagaaatccgcttcgatactggttttcgccatctcttgcgcccactgtttcatttcactaaacagttgctgtgcggtttgttgttcgcccagcagtcgcagcgccatcccttgccagaagagataatcaaccggctgatcgttgtaataactgtgaatgttaatagtgcgatcgccggtcgccgccagacgtaaacaacgcgtcgcttcagtttcatcgccctgcgcgttggcgcatatcgcctgccagaaccagatgtcgttatcagtttgccccggtaaacggccttcgcttaaattctccggataatgcagcgcggcatgaagcagttcgcaggcctgctgcggctgtctggcatcaagatgctgccaggcgcgtaataactggttgaggataaactgactggtgaccttcccttccccgccttcccacgggtggaatttgcgcgtggcgagaatgtccgccgctttgtctgcctgacccgtgagatgccacaaattgagcagttctgcggtcatgtcgtcgcgtttcagcgcaatttccagattattttccagacgcgccagtcgtttctccggtgtggctccacttaacttatccagcaaatcccgttcgaaaagcagacgtgcatcctgcggcgcaagctgataagcattatcaagataacgcgcggccagctcataatcgtgttgcttattccacgcatggatcgctaacccgcgccagccgtcggcaaactccgggctcatctctacgcaacgttgccaaaaggcaatggctttgttgtagctacgtttgttgtagtagaagcaagctagtaaatggcgagcaaaccagcactcttcaatactctccagcgccgccacttcttccagcgtattcgggaaacggacaaactgcgggaagacatcaatggcttttgcgaccagttcgccacgttcggctttcggcagcaagctggcttgcaggtaaagcggcagcgtgcgctggcagtccagtgcgttcagcatctctgccgccagggtgggcattccccagttaatcagttgcccggcggtcatcagggcgttaacgtcgcgtccctgacacagaccgcgccactgcgcgagagcactttcgctacgaccatcgaaccagttcagccaccacagagtggcgttcagcggataatcgcgcagcagtttctcgcgctgcacacgcgcgttgtcctgacgaccacttaacaccagcagcagattatgcaggcaaagcacttcctgattggttgggcaggcgcgaagactttgttggcaaaaatccagaccagcgtcgaagttaccattacgcgccgccagtcgtgccaggccataatagccaccggctttgctgttgccgctccagaccgcacgccagaaatcctcttcggcttgttgatattgtccctgacgttcgtaagcactggcgcgaatcaaactcgcctgtccgcactgcggatttttgttcagcgcatgtgcgcgtttcagagcctgagtggcatacgccaccgcttgcgggaaatctgcgcggttatattccagcatcgccagcgccaggttacagcgataatccagcgggtccagcgccacgccgcgcaggtagtaatcgaacggactacggctggcgtgatgatattgctccagatgctgaccgataaaccaggcttcatctgtactggtaatgtcttgtgctgccagtggcgctttggcgacgtccggtaacggcaacgcttgcggctgatgttcctgataactcagtacaatattgccgtcggcatcggagagctcaatggtcagcctttcaggattgataccgtgcaacacgccctggatggcggtcgcaggcatcagtgccacggcatcatcaagtaacgcgttgcatttaccgatttcgcggatcgccaggcggtatccgttcaacggagagatggcatacagcccccactcaatcccccgcttactacgctggagttttatcaccgcatcgcgggaggcattttgcaccatgcccaaagaatgataaggcaggaaatactgctcaaaacgcttctcttcgtaagcatcaagccaggtaaaatcgggctggttatcggcaaaaataccggtcatcagttcgatatacgggccgttattgtcggtcagactcttatcccacgcctggccaaattcactgtgtccccaactccactgttttttacctggcgcaatatggtggttggcaacgtgcagcaaaccgccatcttcatcgtgacaccacgcgccgacaaaatcgtactggcttttttcggccatataactggttggaacaggcacatttttatagcgagaaatgtccactccagcggagtagtccactttgtagtaagtgccggtagcgatggggaaagcggagacggcccgtttgccgtgatcaaacaccgccgttacatccggcgggaagacgctctgatgcccttccccccctttcactgccgggttggcccaccacaagaaatgacgcggcgtggcgttcccgttatagacgcggctggcgatttccagcgccgcccggtcagggcgcagggtgaaacctgtcatcacctgtaaaccatgcatcggctccgtttcgcctacccacaccgtctgtgcaccgtcttcatgggcttcgagggtgaaatcaacgggcataaaggtggtcgggcgatgatgttgcggccagttaaactcaatcccaccggaaatccacggccccagcagccccaccagcgcaggtttaatgacttcattgtgataaacaaaatcgcgctgtttcactttatcccacgcgcgatgcacccgaccgcccagttccggcaggatcatcactttgatgtagtcgttttccagccacaccgcctgccaggatttcagggttttctgctcgctcagcgtatcggtcacgccgtagggataaaccgcgccggagcttccctgataaacgcgattttccaggaacatgggatgtatatcctgcggcccggtttcataggtcgggatctcaacgcgctcttgccacacttttactggagtcatggtgccctcaatattaacaagacatactgaattaaaagatttgtggcagtgtattgaacaatctggcaatgttttcgcggaataatcacgcaattaactaaacaaggtttagtgaagatgagagcctgcattaataatcaacagattcgccaccataacaaatgcgtgattctggaactgctgtaccggcaaaagcgcgccaataaaagtacgctggcccggctggcgcaaattagcattccggcagtcagtaatattttgcaggaactggaaagcgaaaaacgggtggtgaatattgacgatgaaagccagacgcgcgggcatagtagcggtacatggctgattgcgccggaaggtgactggacgctgtgcctgaacgtgacgcccaccagtattgagtgtcaggttgctaatgcttgtttaagtccgaaaggtgaatttgagtatttacagattgatgcaccgacgccgcaggcgctgctgtccgaaatcgaaaaatgctggcatcgccaccgtaaattgtggccggaccataccatcaacctggcgttggcaatccacggtcaggttgatcctgtgaccggcgtgagccaaaccatgccgcaagcgccgtggacaacgccggtggaggtgaaatatctgctggaagagaagctcggcattcgggtgatggtcgataatgactgcgtgatgctggcgctggcggagaaatggcaaaataatagccaggaacgggatttctgcgtgatcaacgttgattacggcattggcagcagcttcgtgattaacgagcaaatttatcgcggcagtttgtatggtagcggacagattggtcacaccatcgttaatccggatggcgtcgtctgcgactgtggacgttatggctgcctggaaactgtcgccagcttaagcgcattaaaaaaacaggcgcgggtatggctaaaaagtcaaccggttagtactcaacttgatcctgaaaaactgactacagcgcagttaatcgctgcctggcaaagtggagaaccgtggatcaccagctgggttgatcgctctgccaatgccattggtttgagtctgtataacttcctcaacatcctcaatattaatcagatttggttgtacggtcgcagttgtgcctttggtgagaactggcttaatactattattcgccagacaggatttaacccgttcgaccgcgacgaaggaccgagcgtgaaagcgacgcaaattggctttgggcaattaagccgcgcacaacaggtgctgggaattggctatttgtatgttgaggcgcagttacgacagatttgatggcgcgataacgtagaaaggcttcccgaaggaagccttgatgatcataaacgaaaaattgcctgatgcgctacgcttatcaggcctacacggagattgcaatatattgaatttgcaaagttttgtaggccggataaggcgttcacgccgcatccggcatgaacaacgagcacattgacagcaaatcaccgtttcgcttatgcgtaaaccgggtaacgtgcgcagatgtcgagaactttacctttgatgcgctcgataacggcttcatcattgatgctgtccagcacgtcacacatccagccagccagttctttcgcttcggcttctttaaagccgcgacgggtaatcgccggagtacctacacgaataccggaggtcacaaacgggctcttcggatcgttcggtacgctgtttttgttgacggtgatgttagcacggcccagagcggcgtctgcttctttaccggtcaggtttttatcaaccagatcaaccaggaacaggtggttatcagtgccgccggaaaccactttgtagccgcgctcgaggaacacttctaccatcgctttagcgtttttagcgacctgctgctggtaagttttgaactcaggctccatcgcttctttcagagcaaccgctttaccggcgattacgtgcatcaacggaccgccctgaccaccagggaaaacggcagagttcagttttttgtacagctcttcgctaccacctttcgccaggatcaggccgccgcgcggacccgccagggttttgtgagtggtggtagtaacaacgtgagcatgaggaaccgggttcgggtagacgccagcagcaaccaggcccgcaacgtgcgccatatcaacgaacaggtaagcaccgatgctgtcagcgatttcacgcattttcgcccagtccaccacgccggaatatgcagagaaaccaccgataatcattttcggcttgtgttctttggcttgtttttccagatcggcgtagtcgatatgaccggtagcatcgataccgtaaggaacgatgttgtacagtttaccggagaagttaaccggagaaccgtgagtcaggtgaccgccatgcgccaggttcatacccagaacggtatcacctggttccagcagcgcggtgtagaccgcaaagttagcctgggagccggagtgcggctggacgttagcgtagtcagcgccgaacagttctttcgcacgatcgatcgccagttgttcaacgatatcaacatactcgcaaccgccgtagtagcgtttgcccggataaccttcagcatatttgttggtcagctgagaaccctgcgcctgcattacgcgcgggctggtgtagttttcggaggcgatcagttcgatgtgctcttcctgacgtactttttcctgctccatagcctgccacagttcggcatcataatcggcaatgttcatttcacgctttaacatccgcatctcctgactcagctaacaataaaatttttggcctttataggcggtcctgttggacaacggcgaacagtataaccgaatcattgtgcgataacaggtcttgacaaaggaatttacgcaaacgattaccttcaggctacgcaaggctttggagaataaagagcttgcaaccggaaacggatttcttttcaggtttgtgatgcaaatttttcacttcatcacattctttctgaaaaacaccaaagaaccatttacattgcagggctattttttataagatgcatttgagatacatcaattaagatgcaaaaaaaggaagaccatatgcttgacgctcaaaccatcgctacagtaaaagccaccatccctttactggtggaaacggggccaaagttaaccgcccatttctacgaccgtatgtttactcataacccagaactcaaagaaatttttaacatgagtaaccagcgtaatggcgatcaacgtgaagccctgtttaacgctattgccgcctacgccagtaatattgaaaacctgcctgcgctgctgccagcggtagaaaaaatcgcgcagaagcacaccagcttccagatcaaaccggaacagtacaacatcgtcggtgaacacctgttggcaacgctggacgaaatgttcagcccggggcaggaagtgctggacgcgtggggtaaagcctatggtgtactggctaatgtatttatcaatcgcgaggcggaaatctataacgaaaacgccagcaaagccggtggttgggaaggtactcgcgatttccgcattgtggctaaaacaccgcgcagcgcgcttatcaccagcttcgaactggagccggtcgacggtggcgcagtggcagaataccgtccggggcaatatctcggcgtctggctgaagccggaaggtttcccacatcaggaaattcgtcagtactctttgactcgcaaaccggatggcaaaggctatcgtattgcggtgaaacgcgaagagggtgggcaggtatccaactggttgcacaatcacgccaatgttggcgatgtcgtgaaactggtcgctccggcaggtgatttctttatggctgtcgcagatgacacaccagtgacgttaatctctgccggtgttggtcaaacgccaatgctggcaatgctcgacacgctggcaaaagcaggccacacagcacaagtgaactggttccatgcggcagaaaatggcgatgttcacgcctttgccgatgaagttaaggaactggggcagagtctgccgcgctttaccgcgcacacctggtatcgtcagccgagcgaagccgatcgcgctaaaggtcagtttgatagcgaaggtctgatggatttgagcaaactggaaggtgcgttcagcgatccgacaatgcagttctatctctgcggcccggttggcttcatgcagtttaccgcgaaacagttagtggatctgggcgtgaagcaggaaaacattcattacgaatgctttggcccgcataaggtgctgtaatttgatgttgccggatggaaacatccggcaacccttgacgcggtttaaattgccgcgtcgtcctcttcaccggtacggatgcgaatgacccgtgccacgtcaaagacgaagattttaccgtcaccgattttgccggtttgcgccgtgcgaataatggtatcgacacaggtatcgacaatgtcgtccggtacgacaatctcaattttcactttcggcagaaaatccaccatatactccgcgccgcggtacagctcggtatggcctttctggcgaccaaagcctttcacttcggtcaccgtcatgccggtaataccgacttcggccagtgcttcgcggacatcgtccagcttgaagggttttataatcgcatcaatctttttcatgctattccttgaaaaggtcgcctgtcttttgatctgctaaacgtaacacataacgccaattcattccttgaaatcgtttgcatccagctcgtgtcgggaaagcagtttataaaattctgtccggttgcgccccgccattctcgccgcgtgggtgacgttgcctttggtgatttgcagcagcttacgcaaatagttgagttcaaactgattacgtgcctcaacaaaggttggcagcgccgtattttcaccctccagcgcctgctccaccagcgcatcactaatcaccggagaactggtcagcgccacgcactgttcaatcacgttgaccaactggcgcacattacccggccagctcgcggtcatcaggcgtttcatcgcatcggtagagaacgcgcggacaaacggtttatgtcgctctgccgcctggcgcaacaggtgatttgccagtagcggaatgtcttctgtgcgctccgccagtgccggaattttcaggctgacaacgttgaggcggtaatagagatcttcgcggaattccccgcgcgccatcgcttttggcagatcacggtgagtggcagaaataatccgcacattgatatcaatatcgcggttactgcccagcgggcgcactttacgctcctgcaacacgcgcagcagtttgacctgtaacggcgcaggcatatcgccaatttcatcgagaaatagcgttccgccttccgccgcctggaataaaccttcgcgattgctgacagcgccagtaaacgcgccacgcgcatgaccaaacagctcgctctccagcaattgctcgggcaatgcgccacagttaatagcaataaatggtttgctgttgcgcgggctggcgttgtggatagcctgggcgaaaatctctttcccggtgccgctctgaccgttaatcaaaacgctgacgtcactttgcgccaccagccgcgcctgttccagcaaacgcagcatcagcgggctgcgggtgacaattgcctcgcgccagcgttcatcggtggctggcgcggattgctccagcgcatcgtcaattgcctgatatagcgcgtctttgtcgacaggcttggtgaggaaactaaaaacgccctgctgtgttgcagcaacggcatcgggaatagaaccatgcgcggtaagaataattaccggcattcccggctgcactttctggatttcagcaaacagctgcataccgtccatttcatccatccgcaggtcgctgatgactaaatctactttttcgcgattcagtacccgtaatccttcagcgccactttccgccgtgaccacactgtagccttcgctggtcaggcgcaggccaagcagtttcagcaatcccggatcgtcatcgaccaataataaatgcgcaggtttatggctcatcaggagtgacctcatgggtggatggcgcgggcttttcactctcgtgcggcgtatccgggctgaaatttccagccggtttgcgggtgctgagctggcgttcaatatcggtcaggttttccagcttgcgggtggtgagttccagttgctgctgtagaacgtgatgttgctggcgcaatgtatccagctcgctgtcgctggactgctggagtttactgtaacgttggcgctcttccgccagttgcagttgcagcgcctgaccatcgcgccagagttgatacagtgggcgaacctgtgccgggatctcggtacttaacgcttcaatacgcgcgaccagctggcggcgctcatacggcgtaattttggcgtcggcgagcaaaatcccttgtttaaaggtattttgccagctgccgtcgtcatattggcgagcttgctgacggctctgcgcaggcattaaacgatcagcacaatccatcgcccgcagccagtaaagcggattggtttcggtacttttaccttgcagcgcccagatgtcgctacattcagtagaaagatagtcagccagttgataaaccggaattttttcttctgctggcgtatcaatggctggcttattgtgattctgcacgcaacccagcaatgccagacatggcagccctgccagccacagccgtcggggcaataatcgttgaaaaatgtgtcgcatattcaccagacttaaagcctatcccagtgggcgtaattgttgcagacagtctggacatggacagcgcggagaaaccggagcgtacatatcgtacgtgaagatttcgagcactgcccggggccgaactgacaaataaaatagcctgataggataggctgttagcattatttcgtgtttttgctgctcggtaattcaatgcggaaacaaacgtcttgcccgctctcgtcgaccagatacagttccccttgcatacggcgaatacaatccctggcaatgcttaatcccagaccgctgcccttcaccgccccttttcgctggtggcttccctgaaaaaagggttcgaagatcatggcgcgttcctcttgcggaatgggcgtgcctgtattgatgacatcaatataaacccgcgcaccatgtaaactgctgcgaaggcaaatgttaccggattcagccccgtagtgcaccgcattggagtaaagattatccagtacgctcatcagcagcattggctccgccaggcaagctgttgctttgagatcgacgtcggtatgcatcattttagcccgtgcgggcaggctatgagcagaaaccactgtctccaccagcggtgctaactcaacattctccagttccaccgcactgtccgcctgtttacggttgtaatcaagcagttgttcgatcagtttttgcaaattgcggctgctgctatcaagaatgctcaccacctctttttgctctggcgtaagcggcccgacaacctggtcagccagtaattcagtgccctcgcgcatactcgccagtggcgtttttaattcatgagataaatgtcttaaaaattgatggcgttgggattccagccaactcaggcgctcacttaaccaaagaatacgttgcccaacgctgcgtaactcgctcggtccactgaagctgacgctattgcccagagaacgcccttcccccagacggttgatcatgcgctcgatatttttcaccggcccgataatcatccgcgtgaaaagcagtaccattaccagactcaccagaaatagcaccaggctttgccaaccaaaatattgcccacgttcggcgatttcacgctgaagctgctgcccacgagagaacaccactgtgcgcgtggcctgtaccatttcggtattggcactggcaaaggcttcaagacgtgcggcggcggcagcatcgggaccgctgttgttacactgaagttgagccagattgtgcaaatcctgacgtaatgcctggtagagtttatcgtccggcagcacgcctgcgtgggcatcgagcatttcgctgtaacgcttgcgctggctttgataaaccttcgccagggttgggtcgtccagcacgcaatactgacggtaactacgctccatctccagcgccgcgttggtcatcgcttcactgcgccgggcatcaataagcgtagtgcggttaaccagcgccgcctgatcgctaagcgcattcaggctttgccaggcttgccatgccagcaccaacaggggcagcagaatcagcaaaaatgccagcattaccagttgtcgtaaactgcggggaaaaacgggccagcgtttcaaggtgttactctcgtcagacgcgaatagcctgatgctaaccgaggggaagttcagatacaacaaagccgggaattacccggctttgttatggaataaggcggtgcctaactcgacgtttcgcccgatggttgatatagctacgctgatatcagaagttggacggcaggcaccttgttgtgcgtcattcgtattttatgtagcacgtcccgaaggggctgacataagtcggtgaatgagccactggttactattatgcagtaactgtgccaataaagaaaatagtttggtaacgtactgattatacgttgctttgaggggtttatgtctcctccgctgtttgaatgtaaatcagccactgtgtcgctaaaaagagacaacttaagataaacttattagataatattaaaatcaatgagttaagtgtcgccagaaagcgacacggcaaaccacccattgtcgtgatttacagacacaaaaaagctcccggagttgggagcttatgatagtggttggtgcttaatgccgcatccgggctgcaaaaccaatgggctgacgacttaccccaactgcttacgcgcattgcggaaaatgcgcatccatgggccatcctcgccccagttttccggatgccaggagttgctgacagtacggaaaacacgttccgggtgcggcatcataatggtgactcgaccactttcagtcgtgactgccgtaataccgttcggactaccgttcgggttagccgggtaggtttcagtgactttgccgaagttatcgacatagcgcagtgccaccagccctttgctttccagtgccgccagatgcgccgcatcacgcacttccacgcgcccttcaccatgagagacagcaatcggcatttggctgcccaccatcccctgcaacagcagagacgggctttgggttacttcaaccaggctgaaacgcgcttcaaagcgatcggaggtattgcgcacaaaacgtggccacaactcactacctgggatcagttcacgcagattagacatcatctggcaaccgttacatacccccagcgccagcgtttgcggacggtggaagaaggttgcaaactcatcgcgtacacggtcattgaacaggatactcttcgcccaaccttcaccggcacccagcacatcaccgtaggagaaaccaccgcacgcgaccagggcgtggaaatcttccaggcccgtgcgtccggtcagcaggtcactcatatgcacgtcgatagcatcaaagcctgcacggtggaaagctgccgccatttcaacatggctgttcacgccctgctcacgcagtacggcaactttcggacgtgcgccagtggcaatatacggtgctgccacatcttcgttgatatcgaagctcagttttacattcaggcccggatcggcgtcgttagatttcgcctgatgctcctgatcggcacactccgggttgtcacgcaggcgctgcatctgccaggtagtttctgcccaccagacacgcaacgtggtgcggctttcgctgaatacagtctgcccgttggcggtaatcacaaaacggtcaccggaaaccgcctgccctacataatggacacaatcagcaagcccatgctgtgccagtacggactcgaccgcttcacggtcagcggcacgaacctgaatcaccgcacccagttcttcgttaaacaacgccgccaggcgatcgtcacccagagtggcgatatccgcgtcaatgccacaatgaccagcaaaggccatttccgccagcgttaccagcaggccgccatcagagcggtcgtgatacgccagcagcttacgctgtgcaaccagcgcctgaatcgcgtcatagaagcctttcagttgcgcgacatcgcgtacatctgccggtttgtcgccaagctgacgataaacctgcgccagcgccgttgcgcccagcgcgttattgcctttgcccaaatcaatcagcagcagtgcgttatcttcggtagaaagctgcggcgtgatggtgtgacgtacatcttccacgcgggcaaatgcagaaatcaccaggctcagcgggctcgtcatttcgcgctcttcgttaccttcctgccagcgggttttcatgctcatggagtctttacccaccgggatcgtcaggcccagcgccggacaaagctcttcgcccacggctttaacggcttcatacaggcccgcatcttcaccagggtggcctgccgccgccatccagttggcggaaagtttgatgcgtttgatatcgccaatttgtgttgcggcgatgttggttaacgcttcaccgaccgccagacgggcagaggcggcgaaatccagcagcgcaaccggcgcacgctcgccaatcgccatcgcttcaccgtagtagctgtcgaggctggcggtagtgaccgcgcagttagcgaccggcacctgccacggccccaccatctgatcgcgcgctaccatgccggttacgctgcggtcgccaatggtcaccaggaaggttttttccgccacagtcggcagatgcagcacacgtttcaccgcgtctgcaatggtgatcccttcacgggccagcgcgtcgcctttcgctttcagcgtttgtacatcgcgggtcatcttcggcgttttaccaagcaggacgtccagcggcagatcgatcggctgattatcaaaatgacgatcgtgcagagaaagatgcagttcttcggtcgcttcaccaatcaccgcgtagggtgcgcgctcacgcttacacagttcgtcaaacagcggtaattgatcggcagcaaccgccagcacgtagcgttcctgggattcgttacaccagatttccagcgggctcatgcccggttcgtcgcttagaatctcgcgcagttcaaatttaccgccgcgcccgccgtcgctcaccagttccggcatggcgttagaaagaccgccagcgccaacgtcgtggataaacaggattgggttggcatcaccaagctgccagcaacggtcgatcacttcctggcagcgacgctccatctccgggttgtcgcgctgtacggaagcaaagtcgaggtcggcatcagactgaccagacgccatagaagacgctgcaccaccgccaagaccgatgttcattgccgggccgccgagaacgaccagcttcgcaccgacgttgatctcgcctttttgtacgtgatcggcgcgaatgttgccgatcccgcccgccagcatgatcggtttgtgataaccgcgcagctcttcgccgttgtggctgttcactttttcttcataagtacggaagtagccgttcagtgccggacgaccaaattcgttgttaaacgccgcgccgcccagcgggccttcggtcatgatgtccagcgcggtgacaatgcgctcaggcttaccgaaatcttcttcccacggctgttcgaagccaggaattcgcaggttggaaacggagaaaccaaccagacccgctttcggctttgcgccgcgcccggtggcaccttcatcgcggatttcaccgccggaaccggtcgccgcgcccggccacggagaaatcgccgtcgggtggttgtgagtttcgactttcatcagaatatgcgccggttcctgatggaaatcgtagcggcccgtttcgtggtcagcaaagtagcggcccacttcagaaccttccattacggcggcgttatctttataagcagagagaacgtgatctggcgtggtttcgaaagtatttttgatcatcttgaacaggcttttcggctgctgttcaccatcgataacccagtcggcgttaaaaattttgtggcggcagtgctcggagttcgcctgggcaaacatatacagttcgatgtcgttcgggttacgaccaagctttgtgaaagcatcctgcagatagtcaatttcatcttccgccagagccaagccaagacgcaggttagcgtcgatcagcgcctgacggccctgccccagcaaatcaacgctggtaaccggagtcggttgatggtgggcaaacaactgctctgcatcatctaaagcaaaaaagaccgtttccatcatgcggtcgtgcagttcagcggtaacctgctgccattgttcattggtcagcgtaccggcttctatatagtaagcaacgccgcgctcaaggcggtttacctgttgtagcccgcagttatgggcaatatcggtcgctttgctagaccagggagagatggtgccaggacgcggggtcaccagcaggagtttgccttgcggggcgtggctggcgagtgccgggccatatttcagcaggcgttcaagttgtgcgtgctcatcatcgtttaacggcgcattgaggtcagcaaaatggacatactcggcgtaaatattgtgaaccgggagcctggcagcctgaaaacgtgccagcagtttgttgattcggaatgcgctcagtgcagggctaccacgcagaatttccatcataagtctctcgtcttctaagctttcggtgtacccaagggggggaaacgggcgtcattataaagaatctgatgcgctgacgaaaccgtttgcgtggaaataaaatcaccatcgtgaattagcaacgcgtgccgccaatggctgtaataagttgccatctggcgcaggtttacgcaaaatgccgctcatttatgagtaaacctttcactattattacgttttttcaagctgggacgcgcacgacacagagaattaactaattgaaaaaattaaagattaattatctgttcatcggcattctggcactgctgctcgcggtcgctctctggccatccattccctggtttggtaaagccgacaaccgtatcgccgccattcaagcgcggggagagttgcgtgtgagcaccattcatactcccctgacttataacgaaatcaacgggaaaccttttggcctggattacgaactggcgaaacagtttgccgattacctcggcgtaaaactgaaagtgaccgtgcggcagaatatcagccagctgtttgacgaccttgataatggtaacgccgacctgctggcggcaggacttgtctataacagtgagcgggtaaaaaattatcagcctggccctacctattattccgtgagtcaacaactggtttataaagtgggtcagtatcgcccacgtacgctgggcaacctgacggcggagcaactcaccgttgcaccgggtcatgtggtggttaacgatctccagaccctgaaagaaacaaaattcccggaattaagctggaaggtagacgacaaaaaaggctctgcggaattaatggaagatgtcatcgaaggaaaactcgattacaccattgctgattctgtcgccatcagcctgtttcagcgcgttcacccggagctcgccgtagcgctcgatatcaccgatgaacaaccggtgacttggtttagcccgttagatggcgataataccctttccgccgccctgctcgacttcttcaacgaaatgaatgaagacggtacgctggcacgcattgaagagaaatacctggggcatggcgatgattttgattacgtcgatacgcgcacatttttacgcgccgtcgatgcggtactgccgcagttaaagcccctgtttgagaaatacgccgaagaaattgactggcgtttgctggccgctattgcttatcaggaaagccactgggatgcacaggccactagtccgacgggtgtgcgcggcatgatgatgttaaccaaaaataccgcgcaaagcctcggcattacggatcgtaccgatgccgaacagagcatcagcggtggcgtgcgttatttgcaggatatgatgagtaaagtgccggaaagtgtgccggagaacgagcggatctggtttgccctcgctgcgtacaatatgggctatgcgcatatgctggatgcccgcgccctgacggcaaaaaccaaagggaatcctgacagttgggctgacgcaaaacagcgtctgcctttacttagccagaaaccctattacagcaagctgacttacggctacgctcgtggacatgaagcctacgcttatgtcgaaaatattcgtaagtatcagattagcctggtgggttatctgcaagagaaagagaagcaggctacagaagcggcgatgcaactggcgcaggattatccggcggtaagccctacggagttgggcaaagagaaatttccttttctcagctttctttcccagagcagtagtaactatttgacccattctccctctctgctgttttccaggaaagggagtgaagagaaacaaaattaatccgtgctggattgcgcttttttctgcgctttaatttcctggcggcgcatgcgaaagaagtcactgagcaacgccgcgcactcatccgccagtattccttccgtaatttccactcggtgattcatacccggatgatgcagcacatccattaaagatcccgcagcgccagttttcgcgtcacgcgcaccaaagaccacgcgaccaatgcgactgtggatcatcgctccggcacacattacacatggttcaagcgtgacatacaacgtggcgtcgatcagacgataattttgcatcaccagaccaccctgccgcagggccatgatttctgcatgtgcggtgggatcatggcgaccaatcgggcggttccagccttcgccgattacccgattgttatgcactaataccgcgccgaccggcacttcccgctcatcccaggcacgtttcgccagcgtcagcgcgtgacgcatccagtattcgtggctaaattcgacttcagacaaaaagaaaactccggttataaaagcgcggcgcattatacacggacgctatgctttactttattccagttgctggagttcaccgcgcggggttactcgccaacgatgctgacagaaataaagcagcggattgtcctgattactgtcgctatagccactgtacagccgcagcggagtgccgattttgcgctccagttgtgcgaccttttcatgtcccagacaacgcatcgtcaatacccaaccaccatagccacgctgaatttggctggcgataagattaacccgcggcagccagggcgtatcgaaataaaccgcttcaaccagcggctgcggagagccggtaatcaaccagatatcagcatcggaacttaacaggtaggtggttaatcgctcctgaaccagcggaaaggcggtaacattgtcgcgaaaccagcgcacgaaatcggcctgcaacgtctgtaaacgtgcttcgctgtgaccaaaagtgcacccccacagaagcagactcatcggccagcgtgccgcacgaccttttatcaataacgcaatggctataatcggtaacaacggcaggacaagtaacgcattcagcggttggcgacgtagtaaatagcgcagaaaactgccgaacatatcctgctgatgcaatgttccatctaagtcaaaaaacaccacacgacgctcgtgagttgccaaaccatattcctctggactgaaacatcctgattaattttcgctactacatagcctaacagatagatcatcacttttccggcaacaatcgaccgcatcatggctaactggaatttttaattcatggcaattagcggcaatggaatataaaattcactcgcgtgtgtctcatattgcctgttgtcgccactatttcatcgcgaggaaagatatgaacggcttacttcgtatccgtcagcgttaccaggggcttgcccagagtgataaaaaactggcggattatctgctgctacaacctgatacggcgcgccatttaagctctcagcaactggccaacgaagccggagtcagtcagtccagcgtcgtgaagttcgcgcaaaaactcggctataaaggttttccggcgcttaagttggcgttgagtgaagcgctggcaagccagccggaaagtccctccgtgcccattcataaccaaatccgcggtgatgatccgttacggctggtcggcgaaaaactaattaaagaaaatactgccgctatgtacgcaacgctaaacgttaatagtgaagagaaactgcatgaatgcgtaacaatgttgcgctctgcgcggcggataattctgaccggtattggcgctagcggtctggtggcgcaaaactttgcctggaagctgatgaagattggcttcaatgctgccgcagtgcgcgatatgcatgcgctactcgcaacagtacaggcgagctcccctgacgatctgttattagccatttcctacaccggtgtacgacgcgagttaaacctggcggcagatgagatgctgcgagtgggcggaaaagtgctggcgattaccggctttactccgaatgccctgcaacagcgtgcttctcattgcctgtataccattgccgaagaacaagcgacaaacagtgctagtatctctgcttgtcacgctcagggaatgttaacggatttgctgttcattgcgctgattcagcaggatctggaactggcaccagaacgtattcgtcatagtgaagcgctggtgaaaaaactggtctaagtaaagaatgcgcgtataatgcccgcccggtttgtgttgttttgagagtttccttatggcgttgttaatcactaaaaaatgcatcaattgtgatatgtgtgaacccgaatgcccgaatgaggcgattagtatgggagatcatatctacgagattaacagcgataagtgtaccgaatgcgtagggcactacgagacaccaacctgccagaaggtgtgcccgatccccaatactattgtgaaagatccggcgcatgtcgagacagaagaacagttgtgggataaatttgtgctgatgcaccacgcggataaaatttaatattctactctggaagtagagtattaattatattactgggaagccttaacgccattatatttatttaattgatgacattagcataatcattcactaagttaatttatatagtatctgcccagacacttatttatagttattaaaggtgcgtccgactggttcaccggacgcaccttaagtacgtttccttgtgttataagaacagaaggatcagctgtaaaacagcaatgatgattttgatgacccgtttaatcaggtatcggcaatcagtcattcgtttttccttaaacaaggaatgcagccattcagattagcccttacatctccccaaaactgaacgtgcgagttattgagggtgcatgctgcactccacaccagagctttgacgacaccactcgtttcaatgggggaattctgtggcatggtgtaaagcacagcaaaatcttcaataacgaagccaattttaatgtacttacgaattggcggtcacgttaatctttccatcaatattgctttcttcgtaaaggctcgagtttttatgctaaagattgcaagttgcttgtaaaagataagtacactgatccataatcgctgttgttgagggtgcatgctgcacaaaattaaagttaaaaagtaaaacccccgttccttaccagttcgggggttttactttttaaagagaacggtattatttttaactttcaataattaccgtggcacaagcatagtgccgctcatctgccagcgttacatgcatatttgcaacgcccagcttttccgccagttttaatgcctcgccccatagccgtagccgtggtttgccgagctcatcattgaatacttcaaattgattaaacgccagaccattgcggatcccggtgccaaacgcttttgctgcggcttctttcacagcaaaacgcttcgccagaaaacgcaccggctggtggtgcgttttccagatagcccattcgttatcgcttaatacgcggcgtgccaggcgatcaccggatcgggcgatcaccgcttcgatgcgagcgatctccacaatatccgtgcctaaacctaatattgccattagccacgcgcttccagcatcagacgcttcatttctgccaccgcatctttcagtccggtcatcactgcacgaccaataatggcatgaccgatattcagttcatgcatctcagggatggcggcaatggctttcacgttgtgataggtcagaccgtgtccggcgttaactttcagaccgaggcttgcggcaaaggtcgcggctttggcgatacgcgccagctcttgcgcctgttcggcgtcagttttggcatcagcatagcaaccggtgtggatctcgataaacggtgcgccaacctctgccgcagctttgatctgctcttcatcggcgtcaataaacagagaaacctgaatcccggcatctgccagacgtttgcaggcatcgcgcattttgtcacgctgccctgcgacatccaggccgccttcggttgttacttcctgacgcttttccggtaccaggcagcaaaaatgtggcttcgtctcaacggcgatcgccagcatctcttcggtcaccgccatctccagattcatgcgggtatccagcgtctgacgcaggatgcgcacgtcgcggtcagtaatgtgacggcgatcttcacgtaaatgcacggtaatgccgtccgctcccgcctgctcggcaataaacgcggcctgcaccggatccgggtaagcggtaccgcgcgcgttgcgcagcgtagcgatatggtcaatgttgacgcctaacagtaattcagccatgacaatcctcatcattcataatgtgttttcaccgttcgcttaggcataaactgccggaacagttccctgctctttaaaggtttaccgccaagatacggcttaagcgccatgcgggtaaagcgtttcgcggcgcgcagtgtgtctgcgtcaggaaattcccgtgcgtttaacgcttttaactgccttccggtgaacgttttattgtcgataacgacgcttgcgataaaccctttttcttcgcgataacgatacgtcatggtgtcatctaccggctcgccgctacccgcacaatgggtaaaattgacgccataacccagatgcccgagcagtgccagttcaaagcggcgcagcgcgggttctggcgtaccagtgacccctgcaagagactgaatgcagtgcaagtaatcgaaaaaaagttcagagaagcgcgtctcgtattccagtacgcgggagagaagttcgttgatgtacagaccgctgtaaagcgtgataccgcttaatggcagcgccaggctgacggcttcagcactgcgcagcgttttgacttcgccacgcccgccaaaacgtagcaagagaggggtgaaaggctgtaatgcacctttcagggtagagcgtttagagcgtgcgcctttggcaaccagacgcacgcgcccgctttcctccgtgaagacgtccagcatcaggctggtttcgctccacgggcgactatgcaggacaaatgcgcgctgccagccttccatcggagttactcttaaagatcgtcaacgtaaccgagactgcgcagtgcgcgttcgtcgtcggcccaaccggatttcacttttacccacagttcaaggtgaacaggcgcttcgaacatttcctgcatgtctttacgcgcttcaatcccgatggttttgatcttggcccctttgttgccaatgaccatcttcttctgcccttcacgctcaacgagaatcaaaccgttgatgtcataaccaccgcgttcgttagagacgaaacgttcgatctccacggtcacggagtacggcagttcagcgccgaggaaacgcatcagtttttcgcggatgatttcagacgccataaaacgctgactgcgatcggtgatgtaatcttccgggaagtgatgagtcgcttcaggtagatgcttacgcacgattgccgcaatagtgtcaacattcagcccggtttcggcagagattggcacgatatcgaggaagttcatctggcttgccaggaactgcaggtgcggcagcagatcggctttctcctgcacgttgtccactttgttcaccgcgaggattaccggcgctttgccttcgcgcagtttgttgagcaccatttcgtcgtccggcgtccagcgggtgccttcaacgacaaaaatcaccagctcaacatcgccaatagagctgctcgccgctttgttcatcaggcggttaatggcgcgtttttcttccatatgcaggcccggtgtatcgacgtagatcgcctgatacgcgccttcagtatggatccccacaatgcggtgacgagttgtctgcgccttgcgggaagtgatggagattttctgccccagcagtttgttcaacaatgtggatttgccaacgttcggacgtccgacgatggcaataaatccgcagtaacttttatcgatgctcattccagctccagttttttcaacgcctgttcggcggcagcctgctcagccttacgacggctactacctgtgccaaccaccggttcactcaggccgctgacctggcagtggatagtaaattcctgatcgtgcgcttcgccacgtacctggactaccagataagtcggcagcggcagatggcgaccctgcaaatattcttgcaagcgcgttttcggatctttttgtttatcgcctgggctaatttcgtccaaacgagtttgataccagttgaggattaatttctcgacggtttgaatatcactgtcgaggaatacgccaccaattaatgcttcgacggtgtcggcgagaatactctcacgacgaaatccaccgcttttaagttcacctggccctaaacgtaagcactcgcctaactcaaattcgcgcgccagttccgccagcgtattgccacggaccagcgtggcgcgcatccggctcatatcgccttcatccacacgagggaaacggtgataaagcgcattggcgataacgtagctcagaatagagtcgcctaaaaattctaaacgctcgttatgtttactgctggcactacgatgagttaatgcctgctgcaacagttcctgatgattaaaagtgtagcccagcttccgttgaagccgattaattacgatggggttcatgcgataccaataaataaatgcgtcaacaattcagcacacgaaacagacctgatatacatggttctgctaactgcttcgctgcagtttcagtttaccggtatatggggaccaacgctgtttcgtgtgccgtggcaacctggaggtgccaaccttaaacttcgggggaatattctatacacaacgacgggggatgtcgttagccacgggagatttatctcataaataattcacgttgtcgccataacggcgacaacgtgaacgaagatggctattaatggatgccgccaatgcgacttaagcgcagaccagtcggccattcgccttcttgcttatcgaagctcatccagatagccgttgcccgaccgaccagattcgcttccggcacaaagccccagtaacggctgtccgcgctgttgtcgcggttgtcgcccatcatgaagtattgtcccggaggaacaatccaggttgccagttgttgccctggctgctggtaatacatccccacctgatcctgcgcaatcggcactgtcagaatgcggtgcgtcacatcacccagtgtctctttacgctcggaaagacgaattccattttctttggtttcgtttttcggcacttcaaagaatccgctggtcgcttccccaccattacggcgactgaaggtctgaacgaaatcgctcggttccacgttactgtaggtgaccggcagcgcgttttcacacgcctggccggaactgcatcccggttgaatcgtcagctctttactgaccggatcgtaagtgactttatcgcccggtaaacccaccgcgcgcttgatgtaatcaagctttggatcttccggatatttaaagaccacgatatcgccgcgtttcggatgaccggtttcgatcagcgttttctggtagataggatctttaatgccataagcaaacttctctaccagaataaaatcaccaattaacagagtcggcatcatgctaccactcgggatctggaacggttcataaataaagctacgcacaatcaatacgatagccagtaccggaaaaacagaagcaccggtttccagccagccaggcttcggcgcaacctttttcaacgttgctttatccagactgtccccggcagccgcctgcgccgctgcctgacgttcccgccgtttaggtgcgaaaaagaatttatccacgcaccataaaatgcccgtcaccagtgtggcaatcaccagaatcagggcaaacatattcgccatgccaactcctaagggttatttgttgtctttgccgacgtgcagaatggcgaggaacgcttcctgcggcagctcgacgttaccgatctgcttcatgcgtttcttaccttctttctgcttctgcagcagctttttcttacggctgatatcgccgccataacatttagccagtacgtttttacgcagctgtttcacggtggatcgcgcaatgatgtgcgtaccaatcgctgcctgaatggcgatatcaaactgctggcgtgggatcagatctttcatcttctccaccaactcgcgaccgcggttttggctattatcacggtgggtgatcaacgccagcgcatcaacacgttcaccgttgattaatacgtctacacgtaccatgtcggacgcctggaagcgcttgaagttgtaatccagagacgcataaccacggctggtagatttcaggcgatcgaagaagtcgagcaccacttccgccatcgggatctcgtacgtcagcgccacctgattaccgtggtaaaccatattggtctgcacgccgcgtttttctacgcacaacgtaataacgttgccgagatatgcctgcggcagcagcatgtgacactctgcaatcggctcgcgcagttcgtagatgttatttaccgcaggcagcttggatgggctgtcgacgtagataacttctctactcgtggtttcaacttcatacactacggtcggcgcagtggtgatcagatccagatcgtattcacgttccagacgttcctggatgatctccatgtgcagcaggccgaggaagccgcagcggaaaccaaagcccagcgcgctggagctttccggctcatagaacagactggcatcgttcaggctgagtttacccagcgcgtcacggaaggcttcatagtcgtcggaacttaccgggaacagaccggcgtatacctgcggtttgactttcttaaagccaggcagcgccttttctgccggattacgcgccagcgttaaggtatcgccgactggagcgccgtggatatctttaatcgcacatacgagccagcctacttcgccacatttcagttcagtgcggtcaacctgtttcggcgtgaagatgcccagacggtcggcgttataggtctgcccggtactcatgactttcactttgtcgcccttacgcagggtgccgtttttaatacggataagactaacaacgcccaggtagttgtcgaaccaactgtcgataattagtgcctgcaacgggccttccggatcgccttccggcggcggaatgtcgcgcaccagacgttcgagaacgtcctgcacaccaacgccggttttcgcactacagcgcaccgcgtcggtggcgtcgatgccgacgatatcttcaatttcttccgccacgcgttcaggatcggctgccggcaggtcaatcttgttcagtaccggcacaacttcgagatccatttccatggcggtgtagcagtttgccagggtttgcgcttctacgccctgcccggcgtcgaccaccagcaatgcaccttcacaggcagccaggctacgggaaacttcataggagaagtctacgtggcccggggtgtcgataaagttaagctgataggtttcgccgtcagacgctttgtagtccagcgtcacgctttgcgctttgatggtaatgccacgctcacgctcaagatccatggaatcgagaacctgcgcctccatttcacggtcagacaggccaccgcagatctggataatacggtcagacagcgtgcttttaccgtggtcaatgtgagctatgatgctaaagttacgtatattcttcataaagtatgattattgtgccttaatgcccggttaaccaggcttttagaagtcgctgttctgagcttaacgtctgtattaatagaaacgccgcattctacactacaacattgaggcgaggaaatgttcataccgtatggattgtggtatctggaaacgtcctcgcatttgttatgcaaaatgcaacaaagccagtgaaatcactggctcgcgtcttcgctagatgtttcaaatcgcacaaggccaggcggcaatgccacgcttaagatgatcggttgccattctgcccgggcagcaaacttacggctgtagccgcgcgcaatcaggaacccgccaataccaccgaggatcgcaccacataatgctgcgacgtcagaagcaaagagtagctgaaataggctagcgataaggaataatcccaccagcgggctcatataaaccagtaatgcggagctaagcaggctgccttcggcgatccccaattccactttttgccccggcactaacggctcatcacagggtacgacaatggtatgcgtggtttgcgggccaagtttatttaacacgcggctaccgcaaccggcgcgactagcgcagctgctgcaactagctttaacatcacaactgaccagcgcctgcccgttttgccaggagacgacggtagcccactctttgatcattgcgctgccccgaacttaatattctcggcaatgcgtttcgccgtttgcggcggcagttcaccgacaatggtgatttcggcgttatcacgtacgcttgtactgacggttctgcgtccggtgcgcaacatctgatcggtgctgcttggcgtagcgcggttaacgtttacgctgaagctgaataatccgtcggaatagagacgactttcgataggcatgttgtccatcgtcggtagcggacgtcgactactggaaacttcgctaaaaccctgtggcaaccaggttggcgtccagctgaatttagctttttcacctacaggaacagaaagcaacggcggcaaatttgccttcgccagcgtctgcatactgctgctgatatcctgattgacgttaaaagcaatcacgcgaaattgttccagcgtttcaccatcgcgatcaaggagatcaacccgcatcggtaatttgctttcggtgtccatccacacgatgtagctgtagcgtgtaccatctcgggcaaccacgcgaatgacttcgcaaagacgatcagcaatacgcgtgcgcccgacggagataaagtcgtagtaaggagaaaggcgtttgaaatcggtatagataaggcttggcagagaatcaacaatgtaatcgccattaagcgtgaacggttcaagtcccggttcaaaatagctgatttcattgccgcgctgtaccacttcccggcgcgggccatccatttgcaacaattgtgcaagaggacggttatcgaggcgtgcatgtcgataacgcagagactcaacaccctgtttattgatgctgatgaaactcagctcgtaattcagactctgactggccaggttcatctgctgtaataacgccccggacgcgggagtggcgctggcgttagcagagaataacaggctacctgtcactaaactcatggcaaaccaaagttgcttcattactggctttgcgttcctaaagtttgaattcctggcacctgtacagcggcttgctgggtttgcgcctgctcaaactgaagctgttcagagtggagtcggcgttgcagttcgtaatcctgcaacattgcattaatgcgacgacgctgctcctgtacctgctgctgttgaccattgtttgcggtcgcttcagaaggtactcccaggcttaccgggctggctttacccatcatcggcagtgtattaaataccggcgtttcgggctgctgggacgtttcagattgtccattatagtgctggacgccaacgataactgcaaggcttacgcatgcggctacgcccatttgggtaagctgtgccgcccacggacgtactttctgccagaatggcattttctgccattgatgcggcgcaggctgggcttccgggatcaatgtcgccggttgacgtactggctcttcttcaatggcggccatcacgcgactagagatatcgaaatggagcacctcgggagtatcaccccgcatactgtcacggattaagtgatagctttcccaggttttctgcatttctgggttatgagccagttcgttaagcagctcactatccagcgtttcgccatccattaaagcggaaagttgttctttctgcatgcctaatacccttatccagtatcccgctatcgtcaacgcctgataagcggttgaactttgttatcaatagcttccctcgctcggaagatacgactacgcaccgtacctaccggacaatccatgatagcggctatctcttcatagctcaggccatccagctcccgcaaggttattgccatgcgtaaatcttccgggagggactcaatagttcggaaaactatctgtctcagttcttcactcaacattaagttctcagggttgctaatttctttcaacgcgccgccactttcgaagttttcagcttcaatggcatccacatcactggaaggtggacgacgcccctgagcaaccaggtaatttttcgctgtatttacagcaatccgatacagccatgtataaaaagcgctatctccccggaagctatccagcgcacgataggctttaataaaagcttcttgtaccacatcgggaacatcaccgctcggcacatagcgggaaaccagactcgccactttatgctgatagcgcactaccagtaagttaaaggctttctgatctcccttctggacccgttcaaccaggacctggtccgttaactgctcgctcatccgaggtaaagtctccccaaaccaaatttccacgcgctatcgaaacgccactccattagctgcaatttgagcaagcaaagggttagagtgtctcgtttttgtaaagttccgtaacgcatctgtttttgtttgtcatgctgtagacggatcattatctatcattataagtctacagaatctgaacatcgcattatctgtgtagaaatgcccatttaactgcctgaagagtaacccaacggcctttttatttcaccacctaatcctccaccagccagtaacttctctttttctcgccgccctgcgtcagcgtgtttagcaactgtaacaaatattaaaatagcaggtgtttatccgcacaacatgatgctatgctgaccaaaccatgtttagtaaattaaacaaagaaaatgaatactctccctgaacatagttgtgacgtgttgattatcggtagcggcgcagccggacttagtctggcgctacgcctggctgaccagcatcaggtcatcgttctaagtaaaggcccggtaacggaaggtagtacattttatgcccagggcggtattgccgccgtgtttgatgaaactgacagcattgacagccatgtggaagacacattgattgccggggctggtatttgcgatcgccatgcagttgaatttgtcgccagcaatgcacgatcctgtgtgcaatggctaatcgaccagggggtgttgtttgatacccacattcaaccgaatggcgaagaaagttaccatctgacccgtgaaggtggacatagtcaccgtcgtattcttcatgccgccgacgccaccggtagagaagtagaaaccacgctggtgagcaaggcgctgaaccatccgaatattcgcgtgctggagcgcagcaacgcggttgatctgattgtttctgacaaaattggcctgccgggcacgcgacgggttgttggcgcgtgggtatggaaccgtaataaagaaacggtggaaacctgccacgcaaaagcggtggtgctggcaaccggcggtgcgagcaaggtttatcagtacaccaccaatccggatatttcttctggcgatggcattgctatggcgtggcgcgcaggctgccgggttgccaatctcgaatttaatcagttccaccctaccgcgctatatcacccacaggcacgcaatttcctgttaacagaagcactgcgcggcgaaggcgcttatctcaagcgcccggatggtacgcgttttatgcccgattttgatgagcgcggcgaactggccccgcgcgatattgtcgcccgcgccattgaccatgaaatgaaacgcctcggcgcagattgtatgttccttgatatcagccataagcccgccgattttattcgccagcatttcccgatgatttatgaaaagctgctcgggctggggattgatctcacacaagaaccggtaccgattgtgcctgctgcacattatacctgcggtggtgtaatggttgatgatcatgggcgtacggacgtcgagggcttgtatgccattggcgaggtgagttataccggcttacacggcgctaaccgcatggccagcaatagtttgctggagtgtctggtctatggctggagcgcggcggaagatatcaccagacgtatgccttatgcccacgacatcagtacgttaccgccgtgggatgaaagccgcgttgagaaccctgacgaacgggtagtaattcagcataactggcacgagctacgtctgtttatgtgggattacgttggcattgtgcgcacaacgaagcgcctggaacgcgccctgcggcggataaccatgctccaacaagaaatagacgaatattacgcccatttccgcgtcagtaataatttgctggagctgcgtaatctggtacaggttgccgagttgattgttcgctgtgcaatgatgcgtaaagagagtcgggggttgcatttcacgctggattatccggaactgctcacccattccggtccgagcatcctttcccccggcaatcattacataaacagataaaaagcctgggtcagcgccgtatacgcttcggaatagttctggtctggcccacgaatgactaagcgatcgctaaagcattctcccgcctgcggggagaatgccagcagcacccgatgcggcagtcgcgcttcgttttccgccacatccgtccgcaaacgtaaatgccagcccatgcttaatgccagctccgtaaaaccattaccaatctgctctggcagcactacgcagaaaaatccctcttcggtaatgcactccgccgcacaggtcagcaagcttgggtgatcaagcgtagtggtatagcgagcctgttcccgttgaggtgtgctgcactctactccctgctgatagtaaggtgggttactgatgattaaatcgaagcgtactgtctgctgtgtaatccactgctgaatatccgccgtatggacgttaatccgctctgcccacggggactggttgatattttcctgcgcctgcgcggcagcttcactttccagttcaactgcatcaatcatcacgctgtcatcggttcgctgcgccagcattaatgccagcaacccgctacccgcgccgatatcaaggcaacgttttaccccagccaccggtgcccatgcgcccaataaaataccatccgttcccactttcatcgcacagcgatcgtgagcaacaaaaaactgtttaaaagtaaatccattacgacgaagcacggatgtagactgactcatgaaaataaaaccttgcaggaaaaacggcgatagcaccgggtgagaacaatacccgagaagcgatatccatacaaacagatgaagattgcagccgtaacgtctataatcagcgccccacacagaggtagaacatgactgtaacgactttttccgaacttgaactcgacgaaagcctgctggaagccctccaggataaaggtttcactcgcccgaccgccattcaggctgccgccattccgcctgcgctcgatggccgtgatgtactcggttctgcgccgacaggcaccggtaaaacggcggcgtatctgctgccagcgttgcagcacctgctcgatttcccgcgtaagaaatccggtccgccgcgtattttgatcctcaccccaactcgcgagctggcgatgcaggtgtccgatcatgcccgcgaactggcgaaacatacgcatctggatatcgccaccatcaccggcggcgtagcctatatgaaccacgcggaagtgttcagcgaaaatcaggacatcgtggtcgccacgaccggacgtctgctgcaatacataaaagaagagaacttcgattgccgcgcggttgaaacgctgatcctcgacgaagcagaccgtatgctggatatgggcttcgctcaggatatcgaacatattgctggcgaaacgcgctggcgtaaacagaccctgctctttagcgcaacgctggaaggcgatgcgattcaggactttgccgagcgtctgctggaagatccggtggaagtttctgccaatccctccacccgtgagcgcaaaaaaattcatcagtggtattaccgcgccgatgatcttgagcataaaaccgcgttgctggtgcatctgttaaaacagccggaagcgacccgcagtattgtgtttgtgcgtaagcgtgagcgtgtgcatgagctggcaaactggctgcgcgaagcgggcatcaacaactgctatctcgaaggtgagatggtacagggcaagcgtaacgaagcgatcaagcgtttgaccgaaggtcgcgtaaacgtactggtcgcaaccgatgttgccgcgcgcggtatcgacattcctgacgtcagccacgtctttaacttcgatatgccgcgcagtggcgatacttatttgcaccgtatcggacgtaccgcgcgcgccggtcgtaaaggcaccgcaattagcctggtggaagcccatgaccatctgctgctgggtaaagtaggccgctatattgaagagccaattaaagctcgcgttattgatgagttacgcccgaaaacgcgtgcgccaagcgaaaagcagaccggcaagccaagcaagaaagtactggctaaacgtgctgagaagaaaaaagctaaagagaaagagaagccgcgggtgaaaaaacgccatcgcgacaccaaaaatattggtaagcgccgtaaaccaagcggaacgggcgtgccaccgcaaacgacagaagagtaatctcaatgccaggtttaagcctggtattaaaagtgctggcaaacgcaaaactgcctgatgcgctacgcttatcaggcctacgtggctcatgcaatatattgaatttgcacgatcttgtaggccggataaggcgttcacgccgcatccggcatgaataaagcgcactttgtcgacaagttaaatgccgggtttaatcccgacattatttttatccagccacaaaactctcttcaacacactgaataaaagtgtgcatcgccgggctaaccgcttttccagcatgatgtgcgcacatggccgtaatggtctggctctgttcgccaaaaggcaattcaattaattctccgcactccaactcttttgccaccgcaaagcgcggtaggtagctgaccccgatattcgccgcgacacaacgcttgatgctttcgatacttataagctcaatggtgttttccaccgtgatccgccgctgacgcagcgtgctctcaaatatctgccggaagacacattgcggttcgttgataataaagctacaggcgttatgtcttcccggctcagtaaaatcgacatctgcaatttgcggactagccaccagcaccagactttgttcacccaactctcgtcgattcagagcatcatcattccctacacgataaaagacgccaacatcggcctcatcattcagtagcgcatcacggatcacgtaacagttcaggctctgcaagcttaaacgcacttttggggcgcgttgccgaaaacgctgcaacacctgcggcattcggtaagagagcaacgtttcgccgctaacaacgcgtagttccccgtccggatcactctcctttttggcagcctcacgaagcgtatccatcactcgggtaagttcataaatgtgcggcagcaacttttttccttcgcgggtaaggcacatccgtcggccaattttctcaaataactggacactaaactcctgctcaagctgctgaatatgaaaagtcaccgtgctttgtgtacagcacaatttttggctagctcgcaaaaaggaaccctcttccaccacggttttaagcgtaataaaacggcgcagatccataaccccaaacctatcgaaaatatcgaatctagaatataaaaacattcatttttttaaatgttccgtgtcgggtactgtctaccaaaacagaggagataacaagtgacaccgacccttttaagtgctttttggacttacaccctgattaccgctatgacgccaggaccgaacaatattctcgcccttagctctgctacgagccatggatttcgtcaaagtacccgcgtgctggcagggatgagtctgggatttttgattgtgatgttactgtgtgcgggcattagttttagtctggcagtgattgacccggcagcggtacaccttttgagttgggcgggggcggcatatattgtctggctggcgtggaaaatcgccaccagcccaacaaaggaagacggacttcaggcaaaaccaatcagcttttgggccagctttgctttgcagtttgtgaacgtcaaaatcattttgtacggtgttacggcactgagcacgtttgttctgccgcaaacacaggcgttaagctgggtagttggcgtcagcgttttgctggcgatgattgggacgtttggcaatgtgtgctgggcgctggcggggcatctgtttcagcgattgtttcgccagtatggtcgccagttaaatatcgtgcttgccctgttgctggtctattgcgcggtacgcattttctattaacgaaaaaaagcggaagaggtcgccctcttccgcttagtaacttgctacttaagccttacaggctttcagtaaaggtacgagcgataacgtcgcgctgctgttccggagtcagagagttaaagcgaactgcataaccggatacacggatggtcagctgcggatatttttccggatgcttaactgcatcttccagagtttcgcgacgcagaacgttaacgttcaggtgttgaccaccttcaacgcgaacttctggtttcacttctactggaacttcacggtattcaatgtcacccagtttgcttactgcaaccacttcatcttctgcataacctgcttttgcaacgatgcaacgcgcttcgcctttttcgctgtccagcagccagaaagagttcagcagatcgtcgttagcggctttagtaatctggatacctgtaatcatgtgatgcctccccggcaaaattatttgatttgttcagcctgtcgcggccaattggtaaaaccattgttgcttgagtgtatatatactcctcaaacacccttgaatctttgatttaaatcaataaaaaccacacatcaagtatggtcgcaaatggattttattgttttacatcaacttatgcgggtgtgaaattttaccaatttacatttttttgcactcgtttaagtctaaaaaatgagcatgattttgttctgtagaaagaagcagttaagctaggcggattgaagattcgcaggagagcgagatggctaacgaattaacctggcatgacgtgctggctgaagagaagcagcaaccctattttcttaatacccttcagaccgtcgccagcgagcggcagtccggcgtcactatctacccaccacaaaaagatgtctttaacgcgttccgctttacagagttgggtgacgttaaagtggtgattctcggccaggatccttatcacggaccgggacaggcgcatggtctggcattttccgttcgtcccggcattgccattcctccgagtttattgaatatgtataaagagctggaaaatactattccgggcttcacccgccctaatcatggttatcttgaaagctgggcgcgtcagggcgttctgctactcaatactgtgttgacggtacgcgcaggtcaggcgcattcccacgccagcctcggctgggaaaccttcaccgataaagtgatcagcctgattaaccagcatcgcgaaggcgtggtgtttttgttgtggggaagccatgcgcaaaagaaaggggcgattatagataagcaacgccatcatgtactgaaagcaccgcatccgagcccgcttagcgcgcatcgtggattctttggctgcaaccattttgtgctggcaaatcagtggctggaacaacgtggcgagacgccgattgactggatgccagtattaccggcagagagtgagtaaatttgcggggaaatgccggatggcagagttgccacccggctgatttatcaggctttattctgacgccaccattcaccaagcaaaacgccggttgcgacagagatattcagcccggcaacgttgcccgtaccgtcaatcttcacgcgcagatcgttcggatcgcgtgcggcatccggtaacccttcatattcctgacccagcaccagtaccattttcgctggcagactagttttgaacagcggtttaccctgctcgctggaagtggtcactacggtgtaacctgcctgacggaaatcatccagcacgttaacaatgttgtcgccagtaatcggctgaacgtgctctgcgccgccttctgcggtacggatagccgccccgctctccagcagtgccgcatcctgcaccacgacacctttcacgccgaagtgcgcgcagctgcgcatcatgccacccaggttatgcgggttagattcgttttccagtgccagaacgcaatcctgcgcgcctgcctggcttacccactgctgcacggttgtaccgttacgctttttgatcaagaagcaaacgccgccgtgatgttccgtgccactcgcttttgtcaattccgcttcatccaccacatggtacgctttgcggtttgctgccatccagcgcaaagcttctttaaaacgcggcgttacactctggataaaccaggcgcgaacaatcgcttccggacggctctggaaaagtgcctgacatgcattttcgccgtagacgcgggtttcttccgcacgctgacgacgcaacacttccggatcaataaaacttttaccactgatgccaccgtgatcggccttttccggcgtctcatcacccggcgcgcgggaaaccgtgcgccacgggctatcttcccacttgcggtcacggggctgactctgtttgtcatcgcgggcggggcgacggccaccgtcagcacgagattttcctggacgcccgccccctttcccggtacgcgggttgtgggtacgtttatcagaatcatcatcactgcggacatacatcactttgaccttgccgcttttacctttcatttcatcgttcatgcttttctccaccagcgctgcgcgaagcgcgcagattacccgaagtccgcgcggttcgccatgatttcgtaccaaagcctgcgactatcatacctattgaataaaacagattgttgtctggaacaatgtccccgataatatgtaacatattagaaacataccggcgtcgttgccgataagtctccttactcatcccgaggttagttatgaataccgtttgtacccattgtcaggccatcaatcgcattcccgacgatcggatcgaagatgcggcaaaatgcggacgctgcggtcacgacttgtttgacggagaggtgattaatgcgaccggtgaaacactcgacaaattgctgaaggatgatctacctgtggtgatcgacttctgggcaccgtggtgcggcccctgccgtaatttcgcaccaatttttgaagatgtcgcgcaagagcgtagcggtaaagtgcgctttgtgaaagtgaataccgaagctgaacgtgaattgagcagtcgctttggaattcgtagtataccgacgatcatgattttcaaaaacggtcaggttgtcgacatgcttaatggcgcagtaccgaaagcgccgttcgatagctggctgaacgaatctctttaatcttaccggggcgcatcttgtgccccgttttctcctctgcgacaatggcgttttttcgacgctctcttatgaccgaaaacgctgttctccagttacgcgccgagcgtattgcgcgcgcaacacgtccttttcttgcccgcggtaatcgcgttcgtcgctgccaacgctgtcttttgccagagaaattatgtctctgtagcacaattaccccagcacaagcaaaaagtcgcttctgtttgctgatgttcgacaccgagccaatgaagcccagtaataccgggcgtctcattgctgatattttgcctgataccgttgcgtttcaatggagccgtaccgaacccagccaggatttgctggagttggtgcaaaacccggactatcagccaatggtggtctttcccgctagctatgctgatgagcaacgggaagtgatcttcacaccacctgccggtaagccaccgctgtttatcatgctcgatggtacctggccggaagctcgcaagatgtttcgtaaaagtccgtatctggataatcttcccgtcatttccgtcgatctttcccggctttctgcctatcgcctgcgtgaagcccaggctgaaggccaatattgtactgccgaggtagccatcgcactgttagatatggccggcgataccggggcggcggcagggttaggcgagcattttacccgctttaaaacacgctatctggcaggaaaaacgcaacatctgggtagcatcacagcagaacagttagaaagcgtttaaaatcattcggtcacttctgcgggagaccggtatgagtcagcgaggactggaagcactactgcgaccaaaaagcatagcggtaattggcgcgagcatgaaacccaatcgcgcaggttacctgatgatgcgtaacctgctggcgggaggctttaacggaccggtactcccggtgacgccagcctggaaagcggtgttgggtgtgttggcctggccggatattgccagcttgccctttacacccgaccttgcggttttatgtaccaatgccagccgtaatcttgctcttctggaagagctcggcgagaaaggctgtaaaacctgcattattctttccgccccggcaagccaacacgaagatctccgcgcctgcgccctgcgccataacatgcgcctgcttggaccaaacagtctgggtttactggctccctggcaaggtctgaatgccagctttagccctgtgccgattaaacgcggcaagctggcgtttattagccaaagcgctgccgtctccaacaccatcctcgactgggcgcaacagcgtaagatgggcttttcctactttattgcgctcggcgacagcctggatatcgacgttgatgaattgcttgactatctggcacgcgacagtaaaaccagcgccatcctgctctatctcgaacagttaagcgacgcgcgacgctttgttagcgcggcccgtagtgccagccgtaataaaccgattctggtgattaaaagcggacgtagcccggcggcacagcgactgctcaacacgacggcaggaatggacccggcatgggatgcggctattcagcgtgccggtttgttgcgggtacaggacacccacgagctgtttagcgcggtggaaacccttagccatatgcgcccgctacgtggcgaccggctgatgattatcagcaacggtgctgcgcctgccgcgctggcgctggatgccttatggagtcgcaatggcaagctggcaacgctaagcgaagaaacctgccagaaactgcgcgatgcactgccagaacatgtggcaatatctaacccgctcgatctacgcgatgacgccagcagtgagcactatattaaaacgctggatattctgctccacagccaggattttgacgcgctgatggttattcatagccccagcgccgctgctcccgcaacagaaagcgcgcaagtattaattgaagcggtaaagcatcatccccgcagcaaatatgtctctttgctgacgaactggtgcggcgagcactccagccaagaggcacgacgtttattcagcgaagccgggctgccgacctaccgtaccccggaaggaaccatcactgcttttatgcatatggtggagtaccggcgtaatcagaagcaactacgcgaaacgccggcgttgcccagcaatctgacttccaataccgcagaagcgcatcttctgttgcaacaggcgattgccgaaggggctacgagcctcgatacccatgaagttcagcccatcctgcaagcgtatggcatgaacacgctccctacctggattgccagcgatagcaccgaagcggtgcatattgccgaacagattggttatccggtggcgctgaaattgcgtagcccggatattccacataaaagcgaagttcagggcgtcatgctttacctgcgtacagccaatgaagtccagcaagcggcgaacgctattttcgatcgcgtaaaaatggcctggccacaggcgcgggtccacggcctgttggtgcaaagtatggctaaccgtgctggcgctcaggagttgcgggttgtggttgagcacgatccggttttcgggccgttgatcatgctgggtgaaggcggtgtggagtggcgtcctgaagatcaagccgtcgtcgcactgccgccgctgaacatgaacctggcccgctatctggttattcaggggatcaaaagtaaaaagattcgtgcgcgcagtgcgctacgcccattggatgttgcaggcttgagccagcttctggtgcaggtttccaacttgattgtcgattgcccggaaattcagcgtctggatattcatcctttgctggcttctggcagtgaatttaccgcgctggatgtcacgctggatatcagcccgtttgaaggcgataacgagagtcggctggcagtgcgcccttatccgcatcagctggaagaatgggtagaattgaaaaacggtgaacgctgcttgttccgcccgattttgccagaagatgagccacaacttcagcaattcattagccgagtcaccaaagaagatctttattaccgctactttagcgagatcaacgaatttacccatgaagatttagccaacatgacacagatcgactacgatcgggaaatggcgtttgtagcggtacgacgtattgatcaaacggaagagatcctcggcgtcacgcgtgcgatttccgatcctgataacatcgatgccgaatttgctgtactggttcgcagcgatctcaaagggttaggcttaggtcgacgcttaatggaaaagttgattacctatacgcgagatcacggactacaacgtctgaatggtattacgatgccaaacaatcgtggcatggtggcgctagcccgcaagctcgggtttaacgttgatatccagctcgaagaggggatcgttgggcttacgctaaatcttgcccagcgcgaggaaagttgagtaaggtactggaaatgttgaccacttaatcgggactggtgttattattgcccgcttatgtcgtctgcattgcacagaggacccttcaatgaacagagaagaaatgcactgtgatgttgagtaaatttaagcgtaataaacatcaacaacaccttgcccaactacccaagatttctcaaagtgttgatgatgtcgatttcttttacgctcccgccgacttccgggagacgctgctggaaaaaatagccagcgcgaagcagcgcatttgcattgtcgccctgtatctcgaacaggatgacggtggcaaaggcattctgaacgcgttgtatgaggctaaaaggcagcgtccggaactggatgtgcgggtgctggtcgactggcatcgtgcacaacgtggacgcattggcgctgcggcatctaacactaacgctgactggtactgccgcatggcgcaggaaaatccgggcgtagatgttccggtttatggcgttccaatcaatactcgtgaagcccttggtgttctgcactttaaaggctttatcatcgacgatagcgtactttatagcggtgccagcctgaacgatgtttacctgcatcagcacgataaatatcgctacgaccgttatcatctgatccgtaaccgtaagatgagtgacattatgtttgaatgggttacacagaatattatgaatggccgcggcgttaatcgtctggatgatgttaatcggccaaaaagcccggaaatcaagaacgatattcgtctgttccgccaggagctgcgtgatgccgcttatcatttccagggcgatgccgacaacgatcagctttctgtaacgccgctagtggggctggggaaaagcagtctgttgaacaagaccattttccatcttatgccttgtgccgagcagaaactaaccatctgtacgccatacttcaacctgccagcaatccttgtgcgcaatattatccagttgctgcgcgaagggaaaaaggtcgaaattattgttggtgataaaaccgcgaatgacttctacattccggaagatgaacctttcaagataattggcgcattgccttatctctatgagatcaatctgcgtcgtttcctgagccgtttgcagtattacgtcaatactgaccagctagtggttcggttatggaaagatgacgacaacacctatcacctgaaagggatgtgggttgatgataagtggatgttgatcaccggtaataacctgaacccgcgcgcctggcgtctggatctggaaaacgccattttgatccacgatccgcaacttgagctggcgccacagcgagagaaagaactggagctgatccgcgagcataccaccatcgttaagcactatcgcgatctgcaaagtattgccgattatccggtgaaggttcgtaaactcatccgccgtttgcgccgtatccgcatcgaccgattaattagccgcatcctgtaatcacaaccccgtcctgtacggggtttgttttttggaggccacgttttgcgtattctttttgtctgttcgctattgttactttctggatgcagccatatggctaacgatagctggagcgggcaggataaagctcaacactttatcgccagcgcgatgctttccgccgccggaaatgaatatagtcagcatcaggggatgagccgggatcgcagtgccatgtttggattgatgttctctgtcagtttgggggcgagtaaagagctttgggatagccgccccgaagggagcggctggagctggaaggatttggcctgggatgtcgccggtgcaagcaccggctataccgtctggcaactgacccgtcattaaagacgcatccccttccctttgcgatgtagcatcaaagaaaccagaaacgccaccacggccatcaaggtcacataccagaagaaggctgtttccattcctatacttttcaggctcaacgctacgtactccgcgctaccaccaaatatagcattagcgaccgcataactcagaccaacgcctaatgcgcgaacctgtgccgggaacatctcagccttcagtattccactgatacttgtataaaaactcactatcagcagggcacacatcaccagaccaaaagcggcataagggctggaaacgttttgcaatgcactgagaataggaacggtaaaaatggctgccaggctaccgaaacataacatactggtacggcgaccaatcttatcgctcagcgcgccaatgagtggttgaataagcatgaatacaaacaatgcggcagtcataatgccactcgccacgttggcatgcattcccgcagtatttaccagatacttctgcatataagtagtgaaggtatagaaacaaagggagcccgcagcggtaaaaccgagaaccatgatgaatgcacggcgattgcgccataatcctttcagagatccagcttcttttaaagcgcgcgtttcttgttggctagtttcatctaactgacgacgtaaccacaacgccacaacagctaacacagctcctaacgcgaaaggaatacgccatccccactctctgagtgcagcgtcttccatggtgtgttgtaaaaccacgacaaccagtagggctagcagttgtccgccgatcaacgtcacatactgaaaacttgcgtaaaaacctttgcgcccttcaacggcaacttcactcatataggtggcgctggtgccatattctccgccaacagataatccctgaaataaacgagcgagaagcaataatgccggagcccacgtacctatagtttcataacctgggaggcaggcgataaccaggcttccgaaacacatcatacacacgcttaacagcatgctttttttgcgaccatgtttatcggctatgcggccaaatagccaaccgcctattgggcgcatcaggaatcccgcagcaaaaacacctgctgtttgtagtagttgagtcgtcgtgttcccggaagggaagaagatgtgggcaaagtagagactacagaagctgtagacatagaaatcgaaccactcgaccagattaccactagaggcccccacaatcgcccaaatgcggcgacgagtatcactacttgtcagtttgctgtctgccgttacagtactttcagccatgccattatgtctcctgccgtaatccgatgcttttgtcggtcgcttttgtttattttttttgtaaaggaaatattatacatttgttgcatatcattatgcaaccttaaccatgaatttagttagcaggaaaatggttattgaggagcttaaggataaatttctggtaaggaggacacgtatggaagtgggcaagttggggaagccgtatccgttgctgaatctggcatatgtgggagtataagacgcgcagcgtcgcatcaggcatttttttctgcgccaatgcaaaaaggccatccgtcaggatggcctttcgcataatttgatgcctggcagttccctactctcgcatggggagaccccacactaccatcggcgctacggcgtttcacttctgagttcggcatggggtcaggtgggaccaccgcgctacggccgccaggcaaattctgttttatcagaccgcttctgcgttctgatttaatctgtatcaggctgaaaatcttctctcatccgccaaaacagcttcggcgttgtaaggttaagcctcacggttcattagtaccggttagctcaacgcatcgctgcgcttacacacccggcctatcaacgtcgtcgtcttcaacgttccttcaggacccttaaagggtcagggagaactcatctcggggcaagtttcgtgcttagatgctttcagcacttatctcttccgcatttagctaccgggcagtgccattggcatgacaacccgaacaccagtgatgcgtccactccggtcctctcgtactaggagcagcccccctcagttctccagcgcccacggcagatagggaccgaactgtctcacgacgttctaaacccagctcgcgtaccactttaaatggcgaacagccatacccttgggacctacttcagccccaggatgtgatgagccgacatcgaggtgccaaacaccgccgtcgatatgaactcttgggcggtatcagcctgttatccccggagtaccttttatccgttgagcgatggcccttccattcagaaccaccggatcactatgacctgctttcgcacctgctcgcgccgtcacgctcgcagtcaagctggcttatgccattgcactaacctcctgatgtccgaccaggattagccaaccttcgtgctcctccgttactctttaggaggagaccgccccagtcaaactacccaccagacactgtccgcaacccggattacgggtcaacgttagaacatcaaacattaaagggtggtatttcaaggtcggctccatgcagactggcgtccacacttcaaagcctcccacctatcctacacatcaaggctcaatgttcagtgtcaagctatagtaaaggttcacggggtctttccgtcttgccgcgggtacactgcatcttcacagcgagttcaatttcactgagtctcgggtggagacagcctggccatcattacgccattcgtgcaggtcggaacttacccgacaaggaatttcgctaccttaggaccgttatagttacggccgccgtttaccggggcttcgatcaagagcttcgcttgcgctaaccccatcaattaaccttccggcaccgggcaggcgtcacaccgtatacgtccactttcgtgtttgcacagtgctgtgtttttaataaacagttgcagccagctggtatcttcgactgatttcagctccatccgcgagggacctcacctacatatcagcgtgccttctcccgaagttacggcaccattttgcctagttccttcacccgagttctctcaagcgccttggtattctctacctgaccacctgtgtcggtttggggtacgatttgatgttacctgatgcttagaggcttttcctggaagcagggcatttgttgcttcagcaccgtagtgcctcgtcatcacgcctcagccttgattttccggatttgcctggaaaaccagcctacacgcttaaaccgggacaaccgtcgcccggccaacatagccttctccgtccccccttcgcagtaacaccaagtacaggaatattaacctgtttcccatcgactacgcctttcggcctcgccttaggggtcgactcaccctgccccgattaacgttggacaggaacccttggtcttccggcgagcgggcttttcacccgctttatcgttacttatgtcagcattcgcacttctgatacctccagcatgcctcacagcacaccttcgcaggcttacagaacgctcccctacccaacaacgcataagcgtcgctgccgcagcttcggtgcatggtttagccccgttacatcttccgcgcaggccgactcgaccagtgagctattacgctttctttaaatgatggctgcttctaagccaacatcctggctgtctgggccttcccacatcgtttcccacttaaccatgactttgggaccttagctggcggtctgggttgtttccctcttcacgacggacgttagcacccgccgtgtgtctcccgtgataacattctccggtattcgcagtttgcatcgggttggtaagtcgggatgacccccttgccgaaacagtgctctacccccggagatgaattcacgaggcgctacctaaatagctttcggggagaaccagctatctcccggtttgattggcctttcacccccagccacaagtcatccgctaatttttcaacattagtcggttcggtcctccagttagtgttacccaaccttcaacctgcccatggctagatcaccgggtttcgggtctataccctgcaacttaacgcccagttaagactcggtttcccttcggctcccctattcggttaaccttgctacagaatataagtcgctgacccattatacaaaaggtacgcagtcacacgcctaagcgtgctcccactgcttgtacgtacacggtttcaggttctttttcactcccctcgccggggttcttttcgcctttccctcacggtactggttcactatcggtcagtcaggagtatttagccttggaggatggtccccccatattcagacaggataccacgtgtcccgccctactcatcgagctcacagcatgtgcatttttgtgtacggggctgtcaccctgtatcgcgcgcctttccagacgcttccactaacacacacactgattcaggctctgggctgctccccgttcgctcgccgctactgggggaatctcggttgatttcttttcctcggggtacttagatgtttcagttcccccggttcgcctcattaacctatggattcagttaatgatagtgtgtcgaaacacactgggtttccccattcggaaatcgccggttataacggttcatatcaccttaccgacgcttatcgcagattagcacgtccttcatcgcctctgactgccagggcatccaccgtgtacgcttagtcgcttaacctcacaacccgaagatgtttcacttcagagttgcgaaaatttgagagactcacgaacaactttcattgttcagtgtttcaattttcagcttgatccagatttttaaagagcaaatatatcaaacaagacttaacagtctgttttgagatattgaggtcggcgactttcactcacaaaccagcaagtggcgtcccctaggggattcgaacccctgttaccgccgtgaaagggcggtgtcctgggcctctagacgaaggggacacgaaaattgcttatcacgcgttgcgtgatattttcgtgtagggtgagctttcattaatagaaagcgaacggccttattctcttcagcctcactcccaacgcgtaaacgccttgctattcacttttcatcagacaatctgtgtgagcactgcaaagtacgcttctttaaggtaaggaggtgatccaaccgcaggttcccctacggttaccttgttacgacttcaccccagtcatgaatcacaaagtggtaagcgccctcccgaaggttaagctacctacttcttttgcaacccactcccatggtgtgacgggcggtgtgtacaaggcccgggaacgtattcaccgtggcattctgatccacgattactagcgattccgacttcatggagtcgagttgcagactccaatccggactacgacgcactttatgaggtccgcttgctctcgcgaggtcgcttctctttgtatgcgccattgtagcacgtgtgtagccctggtcgtaagggccatgatgacttgacgtcatccccaccttcctccagtttatcactggcagtctcctttgagttcccggccggaccgctggcaacaaaggataagggttgcgctcgttgcgggacttaacccaacatttcacaacacgagctgacgacagccatgcagcacctgtctcacggttcccgaaggcacattctcatctctgaaaacttccgtggatgtcaagaccaggtaaggttcttcgcgttgcatcgaattaaaccacatgctccaccgcttgtgcgggcccccgtcaattcatttgagttttaaccttgcggccgtactccccaggcggtcgacttaacgcgttagctccggaagccacgcctcaagggcacaacctccaagtcgacatcgtttacggcgtggactaccagggtatctaatcctgtttgctccccacgctttcgcacctgagcgtcagtcttcgtccagggggccgccttcgccaccggtattcctccagatctctacgcatttcaccgctacacctggaattctacccccctctacgagactcaagcttgccagtatcagatgcagttcccaggttgagcccggggatttcacatctgacttaacaaaccgcctgcgtgcgctttacgcccagtaattccgattaacgcttgcaccctccgtattaccgcggctgctggcacggagttagccggtgcttcttctgcgggtaacgtcaatgagcaaaggtattaactttactcccttcctccccgctgaaagtactttacaacccgaaggccttcttcatacacgcggcatggctgcatcaggcttgcgcccattgtgcaatattccccactgctgcctcccgtaggagtctggaccgtgtctcagttccagtgtggctggtcatcctctcagaccagctagggatcgtcgccttggtgagccgttaccccaccaacaagctaatcccatctgggcacatccgatggcaagaggcccgaaggtccccctctttggtcttgcgacattatgcggtattagctaccgtttccagtagttatccccctccatcaggcagcttcccagacattactcacccgtccgccactcgtcagcgaagcagcaagctgcttcctgttaccgttcgacttgcatgtgttaggcctgccgccagcgttcaatctgagccatgatcaaactcttcaatttaaaagtttgatgctcaaagaattaaacttcgtaatgaattacgtgttcactcttgagacttggtattcatttttcgtcttgcgacgttaagaatccgtatcttcgagtgcccacacagattgtctgataaattgttaaagagcagtgccgcttcgctttttctcagcggcgcggggtgtgcataatacgccttcccgctacagagtcaagcatttctttgcttttctctgttgagattctcaggagaaccccgccgacccggcggcgtgtttgccgttgttccgtgtcagtggtggcgcattatagggagttattccggcctgacaagcgaaaaatataaaaactttatcgttcgctcacttttcaggcaaaacatcttaaatatagtcttttccgtctaacttatagacaaaaacgagccccgaagggctcgttttatcatttactggacggcgacaatccggtcttcattaacttccaggcgaatcactttacccggaaccaattcaccagacagtatttgctgtgccagcgggttttcgatctgctgctgaattgcacgtttcagaggacgtgcaccatagaccggatcgtaaccgttctcgctcagcagtttcagcgcctcgtcagaaatgtggatttcataaccacgttcttccagacgtttgtacagacgtttcaactgaatctgcgcaatgctggcaatgtgctgttcacccagcggatggaagaccaccacttcatcgatacggttaatgaattccggacggaagttatggcttaccacaccgagcaccagctctttcatgtgcgcataatccagttcaccgaagcgttcctgaatcagatcggaaccgaggttagaggtcataatgacgaccgtattacggaagtcgaccgttctcccttgcccgtcagtcagacgcccatcatccagtacctgcaacagaatgttgaagacatccggatgcgctttttccacttcatccagcaggatgacggaatacggacgacgacgcaccgcttcggtcaggtagccaccttcttcataaccgacatatcccggaggcgcaccaaccaaacgagacacgctgtgtttctccataaactcggacatatcgatacggaccatcgcctcgtcgctatcaaacataaagttcgccagcgccttacaaagctctgttttccccacaccagttgggccgaggaacaggaaactaccaatcgggcgatttggatccgccagccccgcacggctacgacgaatagcgttagataccgcatcaaccgcttcgttctgaccaattacgcgatggtgcagttcttgctccatacgcagcagtttttcgcgctcgctttccatcatgcgagaaaccggaatccccgtccaacgcgccagcacttcagcaatttcggcgtcggtcactttattacgcaacagacgcatagttttgccttcgagctgcgttgcggcttccagttgcttttccagttccgggattttgccgtattgcagttcagacatccgcgccaggtcccccacacggcgagcctgttcaatagcgattttcgcctgttccagttccgctttaatggtctgcgtaccagaaaggcttgccttctctgctttccactcttcttctaactcggagtactgacgttctttgtcgctcagttcttcgttgagcatatccagacgttttttactggcttcatcagactctttcattaacgcctgttgttccagtttgagctggatgatacgacgatcgagtcggtcgagttcttctggtttactgtcaatctgcatacgaatgctggatgctgcttcatcgatcaggtcgatggctttatccggcagctgacggtcagcaatgtagcgatgagacaacgtcgccgctgcaacaattgccgggtcagtaatttgcacatggtggtgcaattcgtaacgttctttcaggccacgcagaatcgcaatggtatcttcaacagaaggctcggcaacaaacactttctggaaacgacgttccagcgcagcatctttttcaatgtactggcgatattcgtcaagcgtcgtggcacctacgcagtgcaattcaccacgcgccagcgccggtttcagcatgtttccggcgtccattgcgccatcggctttacccgcgccgaccatggtatgtaattcgtcgataaataggatgacgttgccttcctgtttggcaagatcgttaagcacgccttttaaacgttcttcaaactcaccgcgatatttcgccccagccaccagcgcgcccatatccagcgccagtacccggcggcctttcaacccttccggcacttcgccgttgataatacgctgcgccagaccttcaacgatggcagttttaccgacgccgggttcaccaatcagtaccgggttatttttagtacgacgttgcagcacctgaatggtacggcgaatttcttcatcacgaccaatcaccggatcgagtttgccctgttcggctcgttcggtaaggtcgatggtatattttttcaaagcctgacgttggtcttcagcaccttgatcgttcacgctttcacctccacgcatttgttcaatcgcttgagtaatgttggcggtggtcgcccctgctgctttcaggatgtcggccagcgtgccgcgagactcaagtgccgccagaacgaacagttcactgctgataaagttatcaccacgtttttgcgccagcttgtcgcaaagattaagaacgcgcaccagatcctgacttggctggacatcaccaccagtaccttcaacctgcggtaaacgatttaatgcctgattgatatctgtgcgcaactggccagcatttatgccagcggatgttaataaaggactaacgctacccccttcctgattcagcagggcgctcattaaatgaagtggttcgataaattggttgtcgtgcccgagtgcaagactttgggcatcggcaagagcaagctggaatttattagtaagacgatccagacgcataactcctcccataacggatcaaagttgctactggagattaaatgaggtcatccctcaattattcaaggttattgaccagattaatgtgaaaagaaaatcacgcgtaccggatcgtcttgattctttaggttatatcagccaaatgaaacttgccatacgaccggtggtcttgtcgcgacgataagagaagaaagtctcattttccgtatatgtacaacggtcgccgccgaaaatttgctcaacacccacgttcgccagacgctgccgggcaagctgataaatatccgccagatacttatcaccatgctgaatgaaagctgcacttgctttagcgtctactgccataaacgcctcgcgaacctccccccccacttcgaacgcgcgtggaccaattgccggccctaaccaggcgagaatattttccggattatcagcaaaacaggaaaccgtctcttccagcacgcctgcgcacagtccacgccagccagcatgagcggcggcgacttccgttcccgctcgattgcaaaacagcacagggaggcagtcggcagtcatcactgcgcaaaccgtgccgggcgtattgctataagaggcatccgcccgtttactggcataaggttcgccagtgagcttaagcacatctttgccgtgtacctgctcaagccagaccggtttagaaggcaaattgcccgcagcaaaaagtcgcttgcgattctcctcaacgtgatccgggttatcgccacaatgggcaccgaggttgagactgtcatacgggggcaagctcacgccgccgatacgagtggagctacaggccgcaacaccttttggctgcggccactgcgggacaatcagcttactcataaccagtccacttcatccttatgttcttcgaaatcggcgcgcatcacctcaatcagctccaccatatcttgtggaataggcgcatgccattccatttcgatgccggagatcgggtgataaagacgcagcatggttgcatgtagcgcctggcggtcaaacttacgcagcgtggagataaatgcttcgctagcaccttttggcggacgcggacggccaccataaaccggatcgcccaccagcggatgagtgatatgggccatatgcacgcggatctggtgcgtacgtccagtttccagacgcaaccgcagacgcgtgtgcacacggaagtgttccatgatgcgatagtgagtcaccgctggtttgcccatcggatgcaccgccatatgggtacgtttggtcgggtggcgactgattggctcgtccaccgtgccacctgcggtcatatgaccaatcgccaccgcttcatactcacgagtaatttcacgccgttgcaaagattcgactaaacgcgtctgagccggaacggtttttgccacaaccatcaggccagtggtgtctttatccagacgatggacgatgcccgcacgcggtacatcggcaatgggtggatagtaatgaagcaacgcattcagtaccgtgccatccgggttacccgcgccaggatgtaccaccaggtcgcgcggtttattaatgataataatgtcttcatcttcatagacgatatccagcgggatatcctgcggttcaaaacgcgcttcttcttcaatctcagcgttgatggcaacctgctcgccacccaatactttttctttcggcttatcacaaactttgccgttaaccagcactcgctggtcgaggatccattcttttattcggctacgactataatccgggaacatttcggccaaagcctgatctaagcgttgaccgagttggttttcggacaccgttgcagtgagctgtactcgttgtgccatatatactgcttcttcgtttatcgttggggttttacggctttgccgtttaatatagtgtgctattgtagctggtcttaaccgggagcaggaacagagaatctcccgtattacattttgaggaaagtcaaaacgtcatgacgcgcatgaaatatctggtggcagccgccacactaagcctgtttttggcgggttgcagcgggagtaaggaagaagtacctgataatccgccaaatgaaatttacgcgactgcacaacaaaagctgcaggacggtaactggagacaggcaataacgcaactggaagcgttagataatcgctatccgtttggtccgtatagccagcaggtgcagctggatctcatctacgcctactataaaaacgccgatttgccgttagcacaggctgccatcgatcgttttattcgccttaacccgacccatccgaatatcgattatgtcatgtacatgcgtggcctgaccaatatggcgctggatgacagtgcgctgcaagggttctttggcgtcgatcgtagcgatcgcgatcctcaacatgcacgagctgcgtttagtgacttttccaaactggtgcgcggctatccgaacagtcagtacaccaccgatgccaccaaacgtctggtattcctgaaagatcgtctggcgaaatatgaatactccgtggccgagtactatacagaacgtggcgcatgggttgccgtcgttaaccgcgtagaaggcatgttgcgcgactacccggatacccaggctacgcgtgatgcgctgccgctgatggaaaatgcataccgtcagatgcagatgaatgcgcaagctgaaaaagtagcgaaaatcatcgccgcaaacagcagcaatacataacagaaacctgaaacacaaaacggcagcccttgagctgccgtttttttattctgtcagttgtgaaactgaagcgatttagtcgctatcgatctcatcaaatatggctcgctttgagatattcctcaagtaaaaaaacatctcttcctgcgatttctcacaaaaaagattcgttgacaaaaagtgacaaaattatgagattttcatcacacattttgacatcaggaacggtatgctgaattcaccaagacgggaagacaagaggtaaaatttatgacaatgaacattaccagcaaacaaatggaaattactccggccatccgccaacatgtcgcagaccgtctcgccaaactggaaaaatggcaaacacatctgattaatccacatatcattctgtccaaagagccacaagggtttgttgctgacgccacaatcaatacacctaacggcgttctggttgccagtggtaaacatgaagatatgtacaccgcaattaacgaattgatcaacaagctggaacggcagctcaataaactgcagcacaaaggcgaagcacgtcgtgccgcaacaagcgtgaaagacgccaacttcgtcgaagaagttgaagaagagtaatcctttatattgagtgtatcgccaacgcgccttcgggcgcgttttttgttgacagcgtgaaaacagtacgggtactgtactaaagtcacttaaggaaacaaacatgaaacacataccgtttttcttcgcattcttttttaccttcccctgaatgggaggcgtttcgtcgtgtgaaacagaatgcgaagacgaacaataaggcctcccaaatcggggggccttttttattgataacaaaaaggcaacactatgacaagcgaaaacccgttactggcgctgcgagagaaaatcagcgcgctggatgaaaaattattagcgttactggcagaacggcgcgaactggccgtcgaggtgggaaaagccaaactgctcagccatcgcccggtacgtgatattgatcgtgaacgcgatttgctggaaagattaattacgctcggtaaagcgcaccatctggacgcccattacattactcgcctgttccagctcatcattgaagattccgtattaactcagcaggctttgctccaacaacatctcaataaaattaatccgcacagtgcacgcatcgcttttctcggccccaaaggttcttattcccatcttgcggcgcgccagtatgctgcccgtcactttgagcaattcattgaaagtggctgcgccaaatttgccgatatttttaatcaggtggaaaccggccaggccgactatgccgtcgtaccgattgaaaataccagctccggtgccataaacgacgtttacgatctgctgcaacataccagcttgagcattgttggcgagatgacgttaactatcgaccattgtttgttggtctccggcactactgatttatccaccatcaatacggtctacagccatccgcagccattccagcaatgcagcaaattccttaatcgttatccgcactggaagattgaatataccgaaagtacgtctgcggcaatggaaaaggttgcacaggcaaaaagtccgcatgttgctgcgttgggaagcgaagctggcggcactttgtacggtttgcaggtactggagcgtattgaagcaaatcagcgacaaaacttcacccgatttgtggtgttggcgcgtaaagccattaacgtgtctgatcaggttccggcgaaaaccacgttgttaatggcgaccgggcaacaagccggtgcgctggttgaagcgttgctggtactgcgcaaccacaatctgattatgacccgtctggaaagtcgcccgattcacggtaatccatgggaagagatgttctatctggatattcaggccaatcttgaaagtgcggaaatgcaaaaagcattgaaagagttaggggaaatcacccgtagtatgaaggtattgggctgttacccaagtgagaacgtagtgcctgttgatccaacctgatgaaaaggtgccggatgatgtgaatcatccggcactggattattactggcgattgtcattcgcctgacgcaataacacgcggctttcactctgaaaacgctgtgcgtaatcgccgaaccagtgctccaccttgcggaaactgtcaataaacgcctgcttatcgccctgctccagcaactcaatcgcctcgccgaaacgcttatagtaacgtttgattaacgccagattacgctcactgctcataatgatgtcggcataaagctgcggatcctgagcaaacagtcgcccgaccatcgccagctcaaggcggtaaatcgggctagagagcgccagaagttgctcaagctgaacattttcttctgccaggtgcagcccgtaagcaaaagtagcaaagtggcgcagtgcctgaataaacgccatattctgatcgtgctcgacggcgctaatacgatgcagccgagcgccccagacctgaatttgctccagaaaccattggtatgcttccggtttacgtccatcacaccagaccacaacttgctttgccaggctaccgctgtccggaccgaacatcgggtgtagccccagcaccggaccatcatgcgccaccagcatggcctgtaatggcccatttttcacacttgccagatcgaccagaatacaatctttcggtaaaggcggtaatttgccaataacttgctcagtaacgtggattggcacactaacaatcaccattccggcatcggcaacaatatcagccgctcgatcccagtcatgttgctccagaatccgcacctgataaccgctgagggtcagcatcttctcgaacaggcgtcccatctgaccgccaccgccgacgataaccaccggacgcagactcggacaaagtgttttaaatcctttgtcgttttcactggagtaagattcacgcatcacccgacgcaaaacatcctcaatcagatctggcggtacacccagagcttccgcctctgcacgacggctggccaacatagatgcctcgcgctccggaacataaataggcagtccaaagcggcttttcacctcgcccacttcagcaaccagttccagacgcttcgctaataaattcagcagcgctttatcgacttcatcaatttgatcgcgtaatgcggtcaattcagcaaccataataaacctcttaagccacgcgagccgtcagctgcccgttcagatcctgatgaatttcacgcagcaaggcatcggtcatttcccagctaatgcaggcatcggttacggatacaccgtatttcatttcactgcgcggttgctcggaagactgattgccctcgtggatattactttcgatcatcagaccaataatactgcgattgccatctttgatttgagcaaccacggattctgccaccgcaggctgacggcgataatctttattggaattaccgtggctgcaatctaccatcagagacgggcgcagtcccgcctgttccatctctttttcacattgcgcaacatccgcagggctatagttcggcgctttaccaccgcgcaggatcacatggccgtccggattcccctgagtttgtagcaacgcaacctgccctgcctggttaatgccaacaaaacggtgcggctgggcggcggcgcgcatagcgttaattgctgttgccagactgccgtcggtgccgtttttaaaaccaaccggcatggaaagcccggaggccatttcacggtgagtttggctttccgttgtacgagcaccaattgcactccagctaaacagatcgcccaggtattgcgggctattcggatctaacgcttccgtcgccagtggcagtcccatattcaccagctcaagcagcaatttacgcgcgatctgcagcccggcttctacatcaaaagagccatccatatggggatcgttaattaaccctttccagccgacagtggtacggggtttttcaaaatagacgcgcattaccagatagaggctatcgctgacctctgcggcaagggctttaaatcgacgagcatattccagagcagtttccggatcatgaatggaacaaggaccacatactaccagcagacgaggatcgcgcccggcgataatatcactaatgcttttacggctgtcagcaatctgggcttcttgttgcaggctcaatggaaaagcggccttcagttgttccggagtcattaaaacctgttcgtcggtaatatgtacgttattcagcgcgtctttttgcatgatggcgatcctgtttatgctcgtttgcgatagttgatcctcagcgaggatgacgtaacgataacacataaagtaaagttttcaatccatatttcgtacatttttatttacacaggcaatttagtcgcgctttcaacccttacctctgtatagataaatttacactccctttgaaaacaatccgctatgctttgaaaaaggagaaagaaatgatgaaaaagtttatcgcccccttgttggctttactggttagcggatgtcagattgatccttatactcacgcgccaaccttgaccagcaccgactggtatgatgtcggtatggaagatgcgataagcggcagcgccataaaagatgacgatgcatttagcgatagtcaggcggatcgcggtctataccttaaaggatatgccgaaggacaaaagaaaacttgccagaccgattttacttatgcccgaggactttccggtaaaagctttcctgccagctgcaacaatgttgaaaatgccagccaactgcatgaagtaggcaaaaaggggctgatgaaaatgccagcacaatacgattaaattaattaaaaccccacaaataaattaaacataagattttactcattgtgttttatttctcacattgatgacggtcgcatgaaaaaatgatattttaatgagcattctgaaaaaatatcgatgcatttcgagcgaagatggtggggatccctgaatgcgtttttctcaccgactgttcttacttctgattctcctgctgacgggagcaccaatactcgctcaggagccttctgacgttgcgaaaaacgtgcgtatgatggtttccggtattgtcagttacacccgctggcctgcgctaagtgggccaccaaagttatgtatctttagttctagtcgttttagtaccgccctacaagagaatgccgcgacatctttgccttatctgcctgtcatcattcacactcaacaagaggcgatgattagtggctgcaatggtttttattttggcaacgagagtccgacattccagatggaattaaccgaacaatatccgagtaaggcgttattattaattgccgaacaaaataccgagtgcattattggtagcgccttttgtctgatcatccacaataatgacgtcagatttgccgtaaacctggatgccttaagccgtagcggtgtaaaggtcaacccggatgtcttaatgctcgcacggaagaaaaatgatggataacgataattctcttaataagcgccccacgtttaaaagagcattacgcaacatcagtatgaccagcatatttatcactatgatgctgatctggttgctgctttccgtgaccagcgtgctgaccctgaaacagtacgcgcaaaaaaacctggcactgacagcagcaacaatgacttacagtctggaagcagctgtcgtttttgccgatggccctgcagcaactgaaacactggcagcgctgggccagcaagggcaatttagtactgcagaagtacgtgataagcagcaaaatattctggcatcctggcattacacccgtaaggatccaggcgatactttcagtaatttcataagccactggctcttccctgcccccatcattcagccgattcgtcacaatggtgaaaccattggcgaagtacgcttaaccgctcgcgacagtagtatcagccattttatctggtttagcctcgccgtactgaccggttgtattctgctggcaagtggcatcgcaattaccctcacccgccatttgcacaatggcctggtagaagcgctgaaaaatatcaccgatgtcgtacatgatgtgcgttccaaccgcaatttttcccgacgagttagcgaagaacgtatcgctgagtttcaccgcttcgctctcgacttcaacagtctgctggatgaaatggaagagtggcagcttcgtttacaggctaaaaatgcgcagcttctacgtaccgcgctacatgacccattaaccgggctggctaaccgcgcagcgtttcgtagcggcatcaacacgttgatgaacaattccgatgcccgaaaaacgagcgcgttactatttcttgatggcgataatttcaaatacatcaatgatacctggggtcatgcgacgggcgatagagtcttgattgaaatcgcaaaacggttagctgaatttggcgggctgcgacataaagcataccgcctgggcggcgatgaattcgctatggtgctctatgatgtacagagcgaatctgaagtgcagcagatatgtagtgcactgacacaaatctttaatctcccgtttgatcttcataatggccatcagaccaccatgacattaagcattggttacgcgatgaccattgagcacgcctctgcggaaaaattacaagagcttgccgatcacaatatgtatcaggccaaacaccagcgtgccgaaaagctggtgagataacaaggatatatcgatatgataaagcacctggtagcacccctggttttcaccagtctaatactgactggctgccagtcccctcagggaaagtttactcctgagcaagtcgccgctatgcaatcttatggatttactgaatccgccggcgactggagcctgggcttaagtgatgccattctgttcgcaaaaaatgactacaaattgctcccggaaagccagcaacagatccaaaccatggcagctaaattggccagcacagggctaacacatgcccgtatggatggacacaccgataactatggtgaagacagttacaacgaaggcttaagtttgaaacgggcgaatgtcgtggccgatgcatgggctatgggtggacaaattccacgcagcaatctcaccacacagggtttaggaaaaaaatatcccatagccagtaacaagaccgcccagggccgcgccgagaaccgccgcgtcgcagtggtgattactaccccttaaaacaccagcaaacagataaaaaagggccagccaattggccagcccttcttaacaggatgtcgcttaagcgaaatcttagttaagacgctctttgatacgagcagccttaccagtacgctcacgcaggtagtacagtttagctttacgaacagcaccacgacgtttgacagaaatgctgtcaactaccggagagtgagtctggaagacacgctcaacgccttcgccgttggaaattttacgaacagtgaatgcagagtgcagaccgcggttacgaatagcgataaccacgccctcgaatgcctgcagacgttttttggaaccttcaacaacccatactttcacttccacggtatcacccggacggaaggaaggtacgtcctgcttcatctgctcttgttcaagttgcttaataatgttgctcataatttaatctcttatcctgggtaaactgatatctcgggggcttacgccatcccatcatgtttatgttgctgttgtgcgtgttccgttttgaactccgccagcaaccttgcttgctcttcagtcagagccaggttttccagaagttcaggtcttctaagccaggtacggcccaggctctgtttcaaacgccagcgacgtatctcggcatggttgccgctcagtaacactggcggaacttccatcccttctaacacctcaggccgcgtatagtgcgggcaatccagcaatccttcagcaaaggaatcttccgttgcgctggcttcatgtcccagtactcccggaataaaccgggaaacggagtcaatcagcgtcattgctggtaactcaccaccactgagaacgtaatcgccgatactccattcttcgtcaatttcggtttggatcacgcgctcatctataccttcgtagcgaccgcacaccagaatcaatttttgattcgttgccagttcgctgacgcccgcttgatcaagcttgcgtccctgtggactcagataaatcacctttgcgccttcacccgccgcggcttttgctgcatgaatggcgtcccgcaagggttgcaccatcattaacatccccggtccgccgccgtaaggacgatcgtccacggtacggtgccggtcatgcgtgaagtcgcgaggactccagctctggatgctcagcaggccatttttaactgcccggccagttaccccgtaatcggtaattgcgcggaacatttcaggaaacaggctaattatgccaatccacatagcgccgtcttttaccgtttatccggtggtttaaaaaccaggatcccaatctacttcgatactacgagtagtgagatcgactttcttgataacctgcccatcgaggaacggtacgagacgttccttgataccaaacgcatctttcaggtttgccttaatgacgagaacgtcattagatccggtttccatcatatcgacgactttaccgagatcgtagccttcagtggttactacctggcagcccatcaggtctttccagtagtagtccccctcttcaagctgaggcagctggctactatccacgacaatttcacaattcgtcagcaggttcgccgcatcacgatcgtcaacgcctttcagcttgatgatcatgtcctgattgtggtgcttccagctttccagctggacttgctgccactgacccgccttctggataaaccagggctgatagtcaaaaatgctttcggcgtcttcggtggaagaaaacactctgagccacccacgaataccgtaagagctacccatttttcccaaaacgatgggatcaacaggtgcttgcgcggtgagttgtttgctcatcatgaccaccgtgacagattaagctgctttgtttacttctttgatcagcgcagcaacgcgatcagaaatagttgcgccctggccaacccagtgagcgatgcgatccagatccaggcgagtgccttcttctttttcgctagcgattgggttgaagaaaccaacgcgctcgatgaagcgaccgttgcgtgcattacggctgtcagcgacaacaacctggtagaacggacgctttttagcgccgtgacgtgctaaacgaatagttaccataacatcctcttgtgtgaataaaacaaccggaccccatcgaggaacggagtccggtgtcatattaaaagcccgaaaattttactcatttttgcgggaattgcaatcaacagttgctaactctgctgtaaaaggccgtcggcggtgcagccagtttggtgccggagtgcgcgcagtcaccggagcgtacacgcagtacgtgaggatgacgagcacatcccggtgccaaaatggcaaacaagccaggccgattagcgaccagggaagcctgggggcatcatacccttcatgcttctcatcatcttcgccattccgcccttcttcattttcttcatcatgcgctgcatgtcgtcgaactgtttcagaagacggttaacgtcctgcacctgcataccgcaaccggcagcaatacggcgtttacggctacctttgatgatttctggcttagcgcgctctttcatcgtcatgctgttgatgatggcttccatacgcaccagcactttatcgtccatctgactcttgacgttatccgggatctgccccatgcccggcagcttgcccatcagactagccatgccgcccatatttttcatctggcgcagctgctcaagaaagtcgttgagatcgaagccgtcaccttttttcagcttgctggctaatttctctgcctgcgcgcggtcaactttgctttcgatatcttcgatcaggctcagtacgtcgcccatgccgagaatacggctcgcgatgcggtccggatggaacggctccagcgcctcagttttctcgccaacaccgaggaacttgatcggtttgccagtgatgtgacgaatagagagcgccgcaccgccgcgggcatcgccgtccactttggtcaacactacgccggtaagcggtaacgcttcattgaatgcttttgccgtattggccgcatcctgaccggtcatggcgtcaaccacaaacagggtttcaaccgggttaatgctcgcatggacttgtttgatctcgtccatcatcgcttcgtcaacgtgcagacgaccagcggtatccaccagcagcacgtcgtagaatttcagtttggcttctttcagcgccgcgttaacgatatctaccggcttctgaccaacatcagaagggaagaaatcaacgcccacctgctctgccagcgtctcaagctgtttgattgccgccgggcgataaacgtcggcagaaaccaccagcactttcttcttgtgcttctcgcgcaggaacttaccgagtttaccaacgctggttgttttaccggcaccttgcaggcccgccatcagtacgaccgcaggcggttgcgcagccaggttcagggtctggttctcttcgcccatcgccgcaaccagttcgttacggactattttgacgaactcctgccccggcgtcaggctcttattaacttcatgaccaaccgctttctcttttacgcgattgataaactcacgcactaccggcagagctacgtccgcctccagcagcgccatgcgcacttcgcgcagcgtatcttttacgttgtcttcagtgaggcgtccacggccactgatattgcgcagcgtgcggctcaaacgatcggttaaattatcaaacattgtctctcgcctggggtggaaacggttggccgcaatcgcgacacatcatcagtattttgccgcagtataacatgaaggcgtctttgttgttatgcaacggttggagcagcgtagtcctgacgctatactgcttctctttcttattgctcaaactgtcgacatcactatgcccgtttttgctctgctcgcgcttgtcgcctactccgtcagtcttgcgctgattgttcccggtctgctgcaaaaaaacggcggctggcggcgcatggctattatttctgcggtcattgcgctggtctgccacgcaatcgctctggaagcccgcatcctgcccgacggtgatagcggacaaaacctcagcctgctgaacgttggtagtttggtcagtttgatgatctgtacggtaatgaccattgtggcttctcgcaatcgtggctggctgctgctacccattgtctatgcctttgcgcttatcaacctggcgctggcaaccttcatgcccaatgaatacatcacccatctggaagctacgcctgggatgctggtgcacattggcttaagcctcttttcctatgccacgctaattatcgccgccctgtacgcgctgcaactggcgtggattgattaccaactgaagaacaagaagctggcgtttaaccaggaaatgccgccattgatgagtatcgagcgtaaaatgttccacatcacgcagattggcgtggtgctgctaacgctcacgctttgcactggcctgttctacatgcacaacttatttagcatggaaaatatcgacaaggctgtgctctctatcgtggcgtggtttgtctatattgtgctgctgtggggacattatcatgaaggatggcgtggacgccgcgtcgtctggtttaacgttgcgggcgcggtaattctgacactggcctacttcggcagccgaattgtccagcagttaatcagctaaacccagaaaaggagtttcccctggaacacatttctactactacgttgatcattattctgatcatcatggtggtcatttcagcctatttttccgggtccgaaaccggaatgatgaccctcaaccgctatcgtctgcgacatatggcgaaacagggtaatcgcagcgccaaacgcgtcgaaaaattgctgcgtaagccagaccgcctgataagcctggtgttaatcggcaataacctggtcaatattcttgcctccgcgctcggcactattgttgggatgcgtttgtacggcgatgcgggcgtggcaattgcgactggtgtgctgacttttgtcgtactggtatttgctgaggtattgccgaaaaccattgccgcgctgtacccggaaaaagtcgcttatccgagtagttttctgctggctccgctgcaaattttgatgatgccgctggtctggttgctgaatgctatcacccgtatgctgatgcgcatgatgggtatcaaaaccgatatcgtggttagcggctctttgagcaaagaagagttgcgcactatcgtgcacgaaagtcgcagtcaaatttcccgtcgcaatcaggatatgctgctgagcgtgctcgatctggaaaaaatgaccgttgatgacatcatggtgccgcgcagtgaaattatcggtattgatatcaacgatgactggaaaagcattctgcgccaactctcccacagtcctcacgggcgcatcgtgctctaccgtgatagcctggacgacgccatcagtatgctgcgagtacgtgaagcctggcggttgatgagcgagaaaaaagagttcaccaaagaaaccatgctgcgcgccgcggacgagatctattttgtgccggaaggtacgccgctcagcacgcagttggtaaagtttcagcgcaacaaaaagaaagtcggcctggtcgtcaacgagtatggagacattcaggggctggtgacggttgaagatattctggaagagattgtcggcgatttcactacgagcatgagcccaacacttgccgaagaggtcacgccgcaaaacgacggtagcgtgattatcgatggcaccgccaacgtgcgggaaatcaacaaagcctttaactggcatctaccggaagatgatgcccgcacggttaatggcgtcattcttgaggcactggaagagatccctgtcgcaggcacccgcgtgcgtattggcgagtacgatatcgatattctcgacgtacaggacaatatgattaagcaggtaaaagtttttcctgtgaaaccgctgcgcgagagtgtggcggagtaacgaaaacggcccggcattcgcatgcagggccgtgaattattacgaaagcagaaattaagcttttgctttcgctacagtaaccatcgccgcacgaatcgtacgaccattcagcgtataacccttctgcataatgcccagtacgttacctggcgcaacgtcatcagattccaccattgcgatggcctgatgcacattcgggtccagtgggacgttagtttcggcgatcacttcaacgccaaacttacgcacaacatccagcatgctcttcagcgtcagctcaatgccttcaaccatcgcagacatatccgggttagctttatcagccacttccagcgcacgatccaggctatcaatcaccggcagcaattcgttgatgaatttctccagcgcgaatttgtgggctttttcaatatccagttcagtacgacgacgcaggttttccatttcggcttttacacgcaaaatgccgtcacgttcacgggtctgggcttcagccagctgagcttcgagattcgcaactttttcatcgcgcggatccacctgctcagcagaagcttctggctcaactgcctcaatctcttcgtgctgatccatgataatttcttccggggcttgcccctcaggcgttttctgttctttactactcatgaatttctccgcgtttttttcgcattcatctcgctaacttcgcttattatggggatcagtttcagggtttcaagggaagcactcacattgtcatcaatcttcgcaacaaggacctcggaaaaatgaataatcatttcaagtgtattggcattgtgggacacccacggcaccccactgcactgacaacacatgaaatgctctaccgctggctgtgcacaaaaggttacgaggtcatcgttgagcaacaaatcgctcacgaactgcaactgaagaatgtgaaaactggcacgctcgcggagattgggcaactagctgatctcgcggtagtcgttggtggcgacggtaatatgctgggcgcggcacgcacactcgcccgttacgatattaaagttattggaatcaaccgtggcaacctgggtttcctgactgaccttgaccccgataacgcccagcaacagttagccgatgtgctggaaggccactacatcagcgagaaacgttttttgctggaagcgcaagtctgtcagcaagattgccagaaacgcatcagcaccgcgataaatgaagtggtgcttcatccaggcaaagtggcgcatatgattgagttcgaagtgtatatcgacgagatctttgcgttttctcagcgatctgatggactaattattagcacgccaacaggctccaccgcctattccctctctgcaggcggtcctattctgaccccctctctggatgcgattaccctggtgcccatgttcccgcatacgttgagtgcacgaccactggtcataaacagcagcagcacgatccgtctgcgttttagccatcgccgtaacgacctggaaatcagttgcgacagccagatagcactgccgattcaggaaggtgaagatgtcctgattcgtcgctgtgattaccatctgaatctgattcatccgaaagattacagttatttcaacacattaagcaccaagctcggctggagtaaaaaattattctaattttacgccagcctctttactgtatataaaaccagtttatactgtacacaataacagtaatggtttttcatacaggaaaacgactatgttggcacaactgaccatcagcaactttgctatcgttcgtgagcttgagattgattttcatagcggcatgaccgtaataactggcgagaccggcgcgggtaaatctattgcaatagatgccctcggtctttgtctcggtggtcgcgctgaagccgacatggtgcgtaccggcgctgctcgcgctgacctgtgcgcccgtttttctctgaaagatacgccagcggctctgcgctggctggaagaaaaccagcttgaagacgggcatgaatgtttgcttcgtcgcgtgatcagcagcgatggtcgctcccgtggtttcatcaacggtacagctgttcctctgagtcaactgcgcgaactgggtcagttgctgattcagatccatggtcagcacgctcatcaattactcaccaaacctgagcaccaaaaattcctgcttgatggctatgccaatgaaacctctctactgcaggaaatgaccgcacgttatcagttgtggcatcaaagctgccgtgacctcgcgcatcatcaacagttaagtcaggaacgcgccgcccgtgcggaactgctgcaataccaattaaaagaacttaacgaatttaatccgcagcccggagagtttgaacaaatcgacgaagagtacaaacgtctggcgaacagcggtcaattgctgaccaccagccagaatgcattggcattaatggccgacggtgaagacgcaaacctgcaaagtcagctttacacggctaaacaactggtgagcgaattgattggcatggacagcaaactgtccggcgtacttgatatgctggaagaagctaccatccagattgctgaagccagcgatgaactgcgccactactgcgatcgtctggatctcgatcccaaccgactatttgaacttgaacagcgcatcagtaaacagattagcctggcacgtaaacatcacgtcagccctgaggcattgccacagtattaccagagcctactggaagaacagcagcaactggacgatcaggccgacagtcaagaaacgcttgcgctggcggtaacgaaacatcatcagcaggcactggaaatcgcgcgcgcattacaccaacaacgccagcaatatgcagaagaacttgcacagctgatcaccgacagtatgcatgcgctcagtatgccgcatgggcagtttacgatcgatgttaaatttgacgagcatcacctgggcgctgacggtgccgatcgtattgagtttcgggtaaccaccaacccaggtcagccaatgcagcctattgccaaagtcgcatccggtggtgaattgtcccgcatcgcactggcaatccaggtcatcacggcgcgtaaaatggaaaccccggcactgatttttgatgaagtggatgtagggattagcggtccaacagcggcagttgtcggcaaactgctgcgtcaactcggcgaaagtactcaggtgatgtgtgttacccacctgccacaagtcgcgggatgtggtcatcaacactattttgtcagcaaagaaaccgatggtgcgatgacagaaacgcatatgcaatccctgaataaaaaagcgcggttacaagagctggcgcgcctgcttggtggcagtgaagtcacacgtaatacactggcgaatgcgaaagaactgcttgcagcgtaaacttttttcctgcttcacggtcagagtaaacagcaaaacgccgtaagaccggaaagcaaaaggttttaaagtgatgaaaggtctattatcatcggcatattacagatgagccacgtactgctcgggcccgaaaaggaatcaaatcactatgcgctgtaaaacgctgactgctgcagcagcagtactattgatgttgaccgcaggctgttccactctggagcgagtggtttaccgtcctgacatcaaccaggggaactatctgaccgctaacgacgtatccaaaatacgtgttggcatgacgcaacaacaagttgcgtacgcattgggtacaccgctgatgtccgatccatttggtacgaatacctggttctatgtcttccgccagcaaccaggtcatgaaggtgtaactcagcaaacgctgacgctgacctttaacagtagcggtgtgttgaccaatattgataacaaacctgcgctgagtggtaactaataataaagttgctctcaaagacgttaaaaaaggtgctcaatgagcaccttttttctgtctgttatttattcgcacttttttctgctcgttgcctgcgaagctctttcggatcggcaatgagagggcgataaatctccacccgatcgccatcatgcacactatcgcttagttttgccggacggctgtaaatgccgactttgtttttagttaaatcgatatcggtacgcaattccagcaagccactggcgcgaatagcttcttcaaccgtcgcgccctcctgcagcgtcactcgctgcaggtactgcttctcaggtagcgcataagccacctcaacggcaattttacctggcactgtaaacctctttcgcacgaaccgtaaaagcctggaccatattagccgccagctctttaaacacgcgaccaaaggcgagttcaatcaacttattggtaaactcaaagtcgagatgaaactcgatacgacacgcctcctggctcagcggcgtaaacttccatccaccaatcaatttcttgaacggcccatccaccagattcataagaatactttggttactggtcaactggttgcgggtagtaaacgttttgctgatcccagccttagagacatctaccgccgcagtcatctgcccaggagtggactccagaatccgacttccggtacaacccggcaaaaactgaggataagactgaacgtcattcactaactgatacatttgctccgcgctgtagggtaccagtgcggtccggctaatctgaggcataacaatttccatcaacaaaaatccaacaaataatatcatttatcctgctgtaaaaaaaacgctatcccggcgctgggtaacatcgggttcatgctaagatagagccttgtcccccgcaggattgatatggggtgttttcgatttcagattaccgatgattcacgacgcttatgacgaagaaaaaagcacataaacctggtagtgcgaccatcgcgcttaacaagcgcgcccgtcacgaatactttatcgaagaagagttcgaagcgggacttgccctgcaaggctgggaagttaaatccctgcgcgcaggaaaagccaatatcagcgacagctacgtccttctgcgtgacggagaggcatttctgtttggcgctaacatcacgccaatggccgtggcctccacgcatgtggtgtgcgatcctacccgtacccgcaagttacttctcaaccagcgcgaactggacagtttgtacggtcgcgtcaatcgagaaggctataccgtagtggcgctctccctgtactggaaaaatgcctggtgcaaagtgaaaatcggcgtcgccaaaggtaagaaacagcacgataaacgtagtgatatcaaagagcgcgaatggcaggtggataaagcacgtatcatgaaaaacgcccaccgttaaacctgcactccaattattgaccagttcctcaccgcgcctccctctccggcggcgcgaatgaacatcttattggctatcacatccgacacaaatgttgccatcccattgcttaatcgaataaaaatcaggctacatgggtgctaaatctttaacgataacgccattgaggctggtcatggcgctcataaatctggtatacttacctttacacattggggctgattctggattcgacgggatttgcgaaacccaaggtgcatgccgaggggcggttggcctcgtaaaaagccgcaaaaaatagtcgcaaacgacgaaaactacgctttagcagcttaataacctgcttagagccctctctccctagcctccgctcttaggacggggatcaagagaggtcaaacccaaaagagatcgcgtggaagccctgcctggggttgaagcgttaaaacttaatcaggctagtttgttagtggcgtgtccgtccgcagctggcaagcgaatgtaaagactgactaagcatgtagtaccgaggatgtaggaatttcggacgcgggttcaactcccgccagctccaccaaaattctccatcggtgattaccagagtcatccgatgaagtcctaagagcccgcacggcgcaagccctgcgggcttttttgtgccctcaatttgtcccgcgaagtccgaagagaactaattaaatccgaaccttttaggcccattgataggcccaacgaaaagctctattgtttacgttgggctaaacgcagggagactccccacctttgaaaacaggatgtagcgatgaaacttaacgacagtaacttattccgccagcaggcgttgattaacggggaatggctggacgccaacaatggtgaagccatcgacgtcaccaatccggcgaacggcgacaagctgggtagcgtgccgaaaatgggcgcggatgaaacccgcgccgctatcgacgccgccaaccgcgccctgcccgcctggcgcgcgctcaccgccaaagaacgcgccaccattctgcgcaactggttcaatttgatgatggagcatcaggacgatttagcgcgcctgatgaccctcgaacagggtaaaccactggccgaagcgaaaggcgaaatcagctacgccgcctcctttattgagtggtttgccgaagaaggcaaacgcatttatggcgacaccattcctggtcatcaggccgataaacgcctgattgttatcaagcagccgattggcgtcaccgcggctatcacgccgtggaacttcccggcggcgatgattacccgcaaagccggtccggcgctggcagcaggctgcaccatggtgctgaagcccgccagtcagacgccgttctctgcgctggcgctggcggagctggcgatccgcgcgggcgttccggctggggtatttaacgtggtcaccggtagcgcgggcgcggtcggtaacgaactgaccagtaacccgctggtgcgcaaactgagctttaccggtagcaccgaaattggccgccagttaatggaacagtgcgcgaaagacatcaagaaagtgagcctggagctgggcggtaacgcgccgtttatcgtctttgacgatgccgacctcgacaaagccgtggaaggcgcgctggccagcaaattccgcaacgccgggcaaacctgcgtctgcgccaaccgcctgtatgtgcaggacggcgtgtatgaccgttttgccgaaaaattgcagcaggcagtgagcaaactgcacatcggcgacgggctggataacggcgtcaccatcgggccgctgatcgatgaaaaagcggtagcaaaagtggaagagcatattgccgatgcgctggagaaaggcgcgcgcgtggtttgcggcggtaaagcgcacgaacgcggcggcaacttcttccagccgaccattctggtggacgttccggccaacgccaaagtgagcaaagaagagacgttcggccccctcgccccgctgttccgctttaaagatgaagctgatgtgattgcgcaagccaatgacaccgagtttggccttgccgcctatttctacgcccgtgatttaagccgcgtcttccgcgtgggcgaagcgctggagtacggcatcgtcggcatcaataccggcattatttccaatgaagtggccccgttcggcggcatcaaagccagcggtctgggtcgtgaaggtagcaagtatggcatcgaagattacttagaaatcaaatatatgtgcatcggtctttaactggagaatgcgaatgaacagcaataaagagttaatgcagcgccgcagtcaggcgattccccgtggcgttgggcaaattcacccgattttcgctgaccgcgcggaaaactgccgggtgtgggacgttgaaggccgtgagtatcttgatttcgcgggcgggattgcggtgctcaataccgggcacctgcatccgaaggtggtggccgcggtggaagcgcagttgaaaaaactgagccacacctgcttccaggtgctggcttacgagccgtatctggagctgtgcgagattatgaatcagaaggtgccgggcgatttcgccaagaaaacgctgctggttacgaccggttccgaagcggtggaaaacgcggtaaaaatcgcccgcgccgccaccaaacgtagcggcaccatcgcttttagcggcgcgtatcacgggcgcacgcattacacgctggcgctgaccggcaaggtgaatccgtactctgcgggcatggggctgatgccgggtcatgtttatcgcgcgctttatccttgcccgctgcacggcataagcgaggatgacgctatcgccagcatccaccggatcttcaaaaatgatgccgcgccggaagatatcgccgccatcgtgattgagccggttcagggcgaaggcggtttctacgccagcagcccagcctttatgcagcgtttacgcgctctgtgtgacgagcacgggatcatgctgattgccgatgaagtgcagagcggcgcggggcgtaccggcacgctgtttgcgatggagcagatgggcgttgcgccggatcttaccacctttgcgaaaagcatcgcgggcggcttcccgctggcgggcgtcaccgggcgcgcggaagtaatggatgccgtcgctccaggcggtctgggcggcacctatgcgggtaacccgattgcctgcgtggctgcgctggaagtgttgaaggtgtttgagcaggaaaatctgctgcaaaaagccaacgatctggggcagaagttgaaagacggattgctggcgatagccgaaaaacacccggagatcggcgacgtacgcgggctgggggcgatgatcgccattgagctgtttgaagacggcgatcacaacaagccggacgccaaactcaccgccgagatcgtggctcgcgcccgcgataaaggcctgattcttctctcctgcggcccgtattacaacgtgctgcgcatccttgtaccgctcaccattgaagacgctcagatccgtcagggtctggagatcatcagccagtgttttgatgaggcgaagcagtaacgccgctcctatgccggaggcgacgctgcgcgtcttgtccggcctacggggatccaggtcggataaggcgtttacgccgcatccgacaatctgtacgtgaacaggaagaaatctatgttggccgggtaaggcggagccgctctccggcaaaaagaatcaataacaattatacgcgtgacccggcgcgggaaatgtcggggcgctctcccaagtgacacactttcgagaggattcaggatggggcaaagtagccaaccacatgagttaggcggcgggctgaagagtcgccacgtcaccatgttgtctattgccggtgttatcggcgcaagtctgtttgtcggttccagcgtcgccatcgccgaagcgggcccggcggtattactggcctatctgttcgccgggctactggtggttatgattatgcggatgttggcggaaatggcggttgccacgcccgataccggtagcttttccacctatgccgataaagccattggtcgctgggcgggctataccatcggctggttgtactggtggttttgggtactggttatcccgctggaagccaacatcgccgccatgatcctgcacagttgggttccaggcattcccatctggttattttccctcgtcattaccctcgccttaactggcagtaacttattaagcgttaaaaactacggcgaatttgagttctggctggcgctgtgcaaagtcatcgctatcctggcctttattttccttggtgcagtcgcaattagcggtttttacccgtatgccgaagtgagcgggatcagtagattgtgggatagcggcggctttatgcccaacggtttcggtgcggtattaagcgcgatgttgatcaccatgttcagctttatgggcgcagaaattgtcaccattgccgccgcggaatccgacacgccggaaaaacatattgtccgcgccaccaacagcgttatctggcgtatttctatcttctatttatgttctatttttgtcgtcgtggcattaattccgtggaatatgcccggactaaaagccgtcggttcttatcgcagcgtactggaattgctcaatattccccatgcgaaattaatcatggactgcgtgatattactttccgtaaccagttgcctgaacagcgcgctgtataccgcgagtaggatgctctactccttaagtcgtcgcggtgatgctcccgcggtaatgggtaaaatcaaccgcagtaaaaccccgtacgtggcggtgttactctccaccggcgcggcattcttaacggtggtggtgaactattacgcgcctgcgaaggtatttaaatttctgatcgacagctccggcgctatcgccctgctggtttatttagtcatcgccgttagtcagttgcggatgcgcaaaattctgcgagcagaaggaagcgaaattcgcttgcgaatgtggctttatccgtggctcacctggctagtcatcggctttattacctttgtgttggtagtgatgctattccgtccggcgcaacagttagaagtgatctccaccggcttattagcgatagggattatctgtaccgtgccaattatggctcgctggaaaaagctggtattgtggcaaaaaacacccgttcataatacgcgctgatcatgatcaggagtcacaccatgaccattacgtctctggatggctatcgctggctgaagaacgatattattcgcggtaattttcaaccggatgaaaaattacgaatgagtttgctgacaagccgttatgcacttggcgttgggccgttacgggaagctcttagccaactggtggcggaacggctggtcacggtggtgaatcaaaaagggtatcgggtggcgtctatgagtgagcaggagctgctcgatattttcgacgcccgcgccaatatggaagcgatgttagtgagtctggcgattgcccgcggtggcgatgagtgggaggcagacgttctcgcaaaagcgcatctgctgagtaagcttgaggcctgtgacgccagcgagaaaatgcttgatgagtgggatctgcgtcatcaggcgtttcatacggcaattgtggcgggctgtggttctcactatttgctgcaaatgcgtgaacggttgtttgatctggcggcgcgttatcgatttatctggctgcggcgaacggtgcttagcgtggaaatgctggaggataaacacgatcagcaccagaccctgactgcggcggtactggcgcgagataccgcgcgcgccagtgagttaatgcgccagcatttactgacgccaattcccattatccagcaggcgatggctggcaattaattactcttccggaatacgcaacacttgccccggataaattttatccgggctttttagcatcggtttattcgcttcgaagattttattgtacagattagcgttaccgtagacctgtttggaaatggcactcagagtgtcgccagacttaacggtataaaactggctggcagtggctggtgtcgccgttttcacctgatcatcgacactggcaataccggaaatattccccaccgcaacaaggattttctccttcgcctcctgactcaggccgtcaccagtgaccgtcgctttgccgtcggcaatttgaatattcactttatcggcatccggtataccggttttgttcagatgctcctgcaccttcttcgcctgatcgtctttatcgtgctgacctgtaaccgcgtcccagagtttttctccggcatctttcacaaaattgaacagacccatagctacctcattcgttaacggaaacactcagaaagtgtagcagaggaacgcggcgcgttaacgccgcggggatgagcacaggtttaatcgcgggtttgcacccagaacgcgtgaatcaaaccggggatatacccaagcagtgtcaacagaatattaataatgaacgcccaaccgaaccctttaccgagcagcacgccgagcggcggcagaatgatggtgatgacgattctccagaaacccatatgtactccctataagaaaattactcattgtttaaaaagagattttatctcttaagcgtagtaattttagcggagcctgccagtttcagcttacgcttttactctcatttacgctgctgaggctggtatatgttgcatttttagtttagagtttacttaatttagaaaatacttaaataaatatgactgaactcgcgcaattacaggccagtgccgaacaggcagcggccttattgaaagcaatgagccaccctaaacgattgctgattctgtgcatgcttagcggttcccccggcaccagcgcgggagagctgacgcgcattaccggactgagtgcctctgcgacaagtcagcatctcgctcgtatgcgggacgaagggcttatcgacagccaacgggatgcccaacgcattctatattccattaaaaatgaggcggtaaatgccattatcgccaccctgaaaaatgtctattgtccgtaaggagtcactatggctttgacaaccattagcccgcatgatgcacaagaattaatcgcacgcggcgcaaagttaatcgatattcgtgatgctgatgaatatcttcgtgaacatattcctgaagcagatctggctccattatccgtgctggaacagagtggtcttccggctaaattacgtcacgagcaaattatattccactgccaggcaggtaaacgcaccagtaataatgccgataaattagcagcgattgccgcccccgcagaaatctttttactcgaagatgggattgatggctggaaaaaagcaggattgccagtagcggtaaataaatctcaacccttgccgttaatgcgccaggtgcagatcgctgcgggtggtttaatattaatcggcgttgtactgggttataccgtaaatagcggtttcttcttattaagtggctttgttggtgccgggttactgtttgcaggaatcagcggtttttgtggaatggcaaggttgttagataagatgccgtggaaccaacgagcttgagaagcgacgccggacgcgccctagcagcgacatccggcctcagtaattagatcaggaaatcgtcgagagatttaccttctgccagcgcctgagcaattggcttcggtgtacggccctgaccggtccaggttttagtttcaccgttaacatcggtgaatttatatttcgccggacgcggctggcgttttttaccagcgcgtggtgcagcagcagagctattacccaataactcttccgggttaattccgtcagctttcatcagctccagccaggtgctaattttttcctggcgctctgccagttcacgctgctgctgttcttcttcttcacgtctttctttagtgacaaccctgaatttttcgagcatttcttcaagaacgtcaatggagaattcgcgagccatcgcacggagggtgcgaatgttatttaaactttgtaacattacggacataataaagaaaaccttttaacgccaaaacaaaaaaagtatttcgtcgcgtagtgtaagcgatcacttattatatttccacaaaatttaatctatttacagtcctgcgcgagattatttcagctgttattttctgaaactctcagaataatttcaagattatatattagccattttgatgagtaatttagattattggtgaacagagcggcgctctctgctcgctaattccgcaagcctgacaaaatcaaagtgaataaaaatgcaatataacagaataaaagaaaacatccatcactggtgctttctgctgttaatgtacattgtctggcataaaaaatgctgaaaatgacccagctactacatacaccgaattctctacgcttatagcgttacctcacccccaaactttcattagtgatattaaaggtaaggccatatctaattgatttaattaaaaataaatcatatcggcatgtaaaaatccacaatgtacaaaaaacgagccgttacggaatattttatctacaaaaactgactaaataaaaatttttcactaattgattagtcatagccagcgatatacgctatgcgaaaatgcagatggcaatgagatccactgctttcatctccattaacatcccattacgcttttattaaggagcattagcatgttcagtccgcagagtcgcttgcgtcatgcagttgcagatacgttcgcgatggttgtttactgttctgtcgtgaacatgtgtattgaagttttcctctccggaatgagcttcgaacagtctttttattccagattggtagcgattccggtgaacatcttaattgcatggccatacggtatgtaccgtgatctgtttatgcgcgcggcacgcaaagttagcccgagcggctggataaaaaatctggcggatatcctggcttatgtgacgttccagagtccggtgtatgtggcgatcttgttagtggtgggcgcagactggcatcagattatggcggcggtcagtagtaacatcgttgttagcatgttgatgggggcggtttatggctacttcctcgattattgccgccgactgtttaaagtcagccgttaccagcaggtaaaagcctgactcttcttttcgcgactggcatcgccagtcgcgtctttaactggcttcgccaaataaaccattcaaataacgttcaagcgcaacacggctactaaagccatgcgggataccgtaatgctcgtgtcgctcgcctgctaaatagagcggaaattgctggtaatgatcgcaagttttaatatcggaagcgggttcagccagtgtgctactgcgttcttttaatgttggatgaattaccagagcggtacgtcccattcgcgcttcgcgattaacatagacataattttccccacggcggtaaccatacgctttctgggttaccacatcgacagtaaaaccgactttttcaagtacgcgcgccacctcgtctggtcgtaaatacatatttgatcctcgttattatcaaccgcgggcctaccttacctgattgcgcattcacaacgctttcagaaaagtccataaagccgcgatgaacctcagttaagaaaattatggtctacactgaaaattacatcgaattctaatgggggatcatatgtttaaccgaccgaaccgcaacgacgttgatgatggcgtgcaggatatccagaatgatgtcaatcaattagctgacagcctcgaatctgtattgaagtcctggggcagcgacgccaaaggggaagctgaagccgcacgcagtaaagctcaggcattgctgaaagaaaccagggcgcgaatgcatggtcgtactcgcgtccagcaagccgcgcgcgatgccgttggctgcgcggattcttttgttcgtgaaagaccctggtgtagcgtgggtacagcagctgcggtaggtatttttatcggcgcactgttaagcatgcgcaaaagctaatgcaaaaatgataataaatacgcgtctttgaccccgaagcctgtcttcggggtttctttttgcctggtgaatcacaaaaatccccctaccccgtcacgctcatatccagggtaatttcgaccactatttgctatatattgtgtggttgaatcttttttcaactacatctagtatctctgtatcaacagagagacaacccgacgcgtatcatcgcgccgtatcttcattttaaacggaaatacgaatcatgcgcattactatttacactcgtaacgattgcgttcagtgccacgccaccaaacgggcgatggaaaaccggggctttgattttgaaatgattaatgtcgatcgcgttcctgaagcggcagaagcgttgcgtgctcagggctttcgtcagttgccggtagtgattgctggcgatcttagctggtctggtttccgtccggacatgattaaccgtctgcatccagcgccacacgcggccagtgcatgagccagctcgtctacttctccagcagctccgaaaacacgcagcgttttatcgaacgtttaggtctgcccgcggtgcgcatcccgctcaatgagcgggaacggattcaggtagacgagccttacatcctgatcgtgccctcttacggcggcggcggtacggctggcgcggtgccacgacaggtaattcgctttttaaacgacgagcacaaccgggcgttgcttcgcggcgttattgcttctggtaatcgcaactttggtgaggcgtatggccgcgccggagatgtgattgcccggaaatgcggcgtgccgtggctgtaccgttttgaactcatgggtacgcaaagcgatatcgaaaacgttcgtaaaggagtaaccgaattttggcaacgacaaccgcagaatgcctgacgcaggaaacgatggattaccacgcgctgaatgcgatgcttaacctctacgatagcgcaggtcgcattcagttcgataaagaccgccaggccgttgacgcctttattgcgacgcatgtgcgtccgaacagtgtgaccttcagtagccagcagcagcgcctgaactggctggtcaacgaaggttactatgatgaaagcgttcttaatcgctactctcgcgactttgtcattacgctgtttacccacgcacacaccagcggttttcgtttccagacattcctcggggcatggaagttttacaccagctatacgttgaagacattcgacggtaaacgttatctggaagattttgccgatcgagtaacgatggtggcgctgacgctggcacaaggcgatgagacgctggcgttgcaactgaccgatgaaatgctgagtggacgctttcagccagccacgccaacattcctcaactgcggtaagcagcagcgcggcgaactggtttcctgttttttgctgcgtattgaagacaatatggagagcattggtcgggcggtaaattccgcactgcagctgagcaaacgcggcggcggcgtagcatttttgctgagcaatctgcgagaagcgggcgcgccaattaaacgtattgaaaatcaatcttctggcgtaattccggtgatgaaaatgctggaagacgcattttcctatgccaaccaactcggcgctcgtcagggggctggtgcagtctatttacatgctcatcatcccgatattctgcgttttctcgacacgaaacgggaaaatgccgacgaaaaaatccgcattaaaacactgagccttggcgtggtgatcccggatatcactttccatctggcaaaagagaatgcgcagatggcgctgtttagcccttatgacgtagagcgagtttatggcaagccgtttgccgatgtggccatcagccaacactatgacgaactggttgccgatgaacgcattcgcaaaaaatacctcaacgcccgtgatttcttccagcgactggcagaaatccagtttgagtccggctatccctacatcatgtatgaagacacggtaaaccgtgctaaccctatcgccgggcgcataaatatgagtaatctctgcagtgaaattttgcaggttaacagcgccagtgagtatgacgagaatctcgactatacccgcacaggccatgatatttcctgcaatttaggtagcttgaatattgcgcacaccatggattcccccgattttgcccgcacggtagagactgccgtgcgcggtttaacggcagtaagtgatatgagtcatatccgcagcgtgccgtccatcgaagccggaaatgccgccagccacgccatcggactggggcagatgaatttacacggctatctggcgcgagaaggcatcgcttatggtagcccggaagcactggatttcaccaatctctatttctatgccatcacctggcatgcactgcgtaccagcatgttgctggcacgcgaacgcggtgaaaccttcgccgggttcaaacagagtcgctatgccagtggtgaatattttagccaatatctgcaagggaactggcagccgaaaacggcgaaagttggcgaactgtttacccgtagcggtattacgttacctacccgtgagatgtgggcgcagctgcgcgacgacgtgatgcgctacggcatatacaaccagaatcttcaggcggtgccgccaaccggttctatctcttatatcaaccatgctacgagcagtattcatccgattgtggcgaaagtagagatacgcaaagagggcaaaacaggacgcgtttactaccctgccccgtttatgactaacgagaatctggcgctgtatcaggacgcttacgaaattggcgcagaaaagatcatcgacacctacgcggaagcgactcgccatgtcgatcaggggctgagcctgacgctttttttccccgataccgccaccactcgcgatatcaacaaagcgcagatttacgcctggcgcaagggtatcaaaacgctctattacatccgcctgcgtcagatggcgctggaaggcactgaaattgaaggctgcgtctcctgtgcactttaaggaatatctatgaaactcagtcgtatcagcgccatcaactggaacaagatatctgacgataaagatctggaggtgtggaatcgcctgaccagcaatttctggctaccagaaaaggtgccgctgagcaacgatattcctgcctggcagacattaactgtcgtagaacaacaactgacgatgcgcgtttttactggcctgacgctgctcgacacgctgcaaaatgttatcggcgcgccttctctgatgcccgatgcactcacgcctcatgaagaagcggtattaagcaatatcagctttatggaagcggttcatgcccgctcttacagtagcattttcagcacgctatgccagaccaaagatgtcgatgccgcctacgcctggagtgaagaaaacgcaccgttgcagcgaaaagctcagattattcagcaacattatcgcggtgatgatccgctgaaaaagaaaatcgccagtgtgtttcttgaatcttttttgttctattccggtttctggctgccgatgtatttttccagccgcggaaagctgaccaataccgcggacctgatccgtctgattatccgcgatgaagcagtccacggttactacataggctataaatatcagaaaaacatggaaaagatatctctgggacaacgtgaagagttgaagagtttcgccttcgatttgttgctggaactctacgacaacgagttgcaatacaccgatgagctgtacgccgaaaccccgtgggctgacgatgtgaaagcgtttctctgttacaacgccaataaggctttgatgaatctgggctacgaaccgttatttcccgcagaaatggcggaagtgaatccggcaatcctcgccgcgcttagcccgaatgccgatgaaaatcacgatttcttttccggtagtggctcctcttatgtgatggggaaagcggttgaaacagaagatgaagactggaatttctgagggtgttattttcaaaaatatcactacccgcagcagggaaataattcccgccaaatagctttttatcacgcaaataatttgtggtgatctacactgatactctgttgcattattcgcctgaaaccacaatattcaggcgttttttcgctatctttgacaaaaaatatcaactttctcgatttgctctcagcccttatatcacgggaaattccggcgatttgctcgcatcaatattcatgccacatttgccatcaggggttgcctcagattctcagtatgttagggtagaaaaaagtgactatttccattgggtaatatatcgacatagacaaataaaggaatctttctattgcatggcaattaaattagaaattaaaaatctttataaaatatttggcgagcatccacagcgagcgttcaaatatatcgaacaaggacttagtaaagaacaaattctggaaaaaactgggctaagccttggcgtaaaagacgccagtctggccattgaagaaggcgagatatttgtcatcatgggattatccggcagcggtaaatccacaatggtacgccttctcaatcgcctgattgaacccacccgcgggcaagtgctgattgatggtgtggatattgccaaaatatccgacgccgaactccgtgaggtgcgcagaaaaaagattgcgatggtcttccagtcctttgccttaatgccgcatatgaccgtgctggacaatactgcgttcggtatggaattggccggaattaatgccgaagaacgccgggaaaaagcccttgatgcactgcgtcaggtcgggctggaaaattatgcccacagctacccggatgaactctctggcgggatgcgtcaacgtgtgggattagcccgcgcgttagcgattaatccggatatattattaatggacgaagccttcagcgcgctcgatccattaattcgcaccgagatgcaggatgagctggtaaaattacaggcgaaacatcagcgcaccattgtctttatttcccacgatcttgatgaagccatgcgtattggcgaccgaattgccattatgcaaaatggtgaagtggtacaggtcggcacaccggatgaaattctcaataatccggcgaatgattatgtccgtaccttcttccgtggcgttgatattagtcaggtattcagtgcgaaagatattgcccgccggacaccgaatggcttaattcgtaaaacccctggcttcggcccacgtagcgcactgaaattattgcaggatgaagatcgcgaatatggctacgttatcgaacgcggtaataagtttgtcggcgcagtctccatcgatagccttaaaaccgcgttaacgcagcagcaaggtcttgatgcggcgctgattgatgcgccgttagcagtcgatgcacaaacgcctcttagcgagttgctctctcatgtcggacaggcaccctgtgcggtgcccgtggtcgacgaggaccaacagtatgtcggcatcattagcaaaggaatgctgctgcgcgctttagatcgtgagggggtaaataatggctgatcaaaataatccgtgggataccacgccagcggcggacagtgccgcgcaatccgcagacgcctggggtacaccgacgactgcaccgactgacggcggtggtgctgactggctgaccagtacgcctgcgccaaacgtcgagcattttaatattctcgatccgttccataaaacgctgatcccgctcgacagttgggtcactgaagggatcgactgggtcgttacccatttccgtcccgtcttccagggcgtgcgcgttccggttgattatatcctcaacggtttccagcaattgctgctgggtatgcccgcaccggtggcgattatcgttttcgctctcatcgcctggcagatttccggggtcggaatgggtgtggcgacgctggttagcctgattgccatcggcgcaatcggtgcctggagccaggcaatggtgactctggcgctggtgttaaccgccctgctgttctgtatcgtcatcggtttgccgttggggatatggctggcgagaagtccgcgagcggcgaaaattattcgtccactgcttgatgccatgcagaccacgccagcgtttgtttatctggtgccaatcgtcatgctatttggtatcggtaacgtgccgggcgtggtggtgacgatcatctttgctctgccgccgattatccgtctgaccattctggggattaaccaggttccggcggatctgattgaagccagccgcagtttcggtgccagcccgcgccagatgctgttcaaagttcagttaccgctggcgatgccgaccattatggcgggcgttaaccagacgctgatgctggccctttctatggtggtcatcgccagcatgattgccgtcggcgggttgggtcagatggtacttcgcggtatcggtcgtctggatatggggcttgccaccgttggcggcgtcgggattgtgatcctcgccattatcctcgatcgtctgacgcaggccgttgggcgcgacagtcgcagtcgcggcaaccgtcgctggtacaccactggccctgttggtctgctgacccgcccattcattaagtaactctgcacttgcccggtgacgccgggcattatcaccctgccaaaaaaaggaataacaatgcgacatagcgtactttttgcgacagcgtttgccacgcttatctctacacaaacttttgctgccgatctgccgggcaaaggcattactgttaatccagttcagagcaccatcactgaagaaaccttccagacgctgctggtcagtcgtgcgctggagaaattaggttataccgtcaacaaacccagcgaagtagattacaacgttggctacaccagccttgcttccggcgatgcaaccttcaccgccgtgaactggacgccactgcatgacaacatgtacgaagctgccggtggcgataagaaattttatcgtgaaggggtatttgttaacggcgcggcacagggttacctgatcgataagaaaaccgccgaccagtacaaaatcaccaacatcgcacaactgaaagatccgaagatcgccaaactgttcgataccaacggcgacggaaaagcggatttaaccggttgtaaccctggctggggctgcgaaggtgcgatcaaccaccagcttgccgcgtatgaactgaccaacaccgtgacgcataatcaggggaactacgcagcgatgatggccgacaccatcagtcgctacaaagagggcaaaccggtgttttattacacctggacgccgtactgggtgagtaacgaactgaagccgggcaaagatgtcgtctggttgcaggtgccgttctccgcactgccgggcgataaaaacgccgataccaaactgccgaatggtgcgaattatggcttcccggtcagcaccatgcatatcgttgccaacaaagcctgggccgagaaaaacccggcagcagcgaaactgtttgccattatgcagttgccagtggcagatattaacgcccagaacgccattatgcatgacggcaaagccagtgaaggcgatattcagggacacgttgatggttggatcaaagcccaccagcagcagttcgatggctgggtgaatgaggcgctggcagcgcagaagtaatttttattcgggcggataaggcgtttttgccgcatccgccgttctgtgcacaatgcctgatgcgacgctggcgcgtcttatcatgcctacaaaccacatcgcacatttcaacaatctatctttcatcccatattcatcaacatccgctattattgatttccagcttaatcatcacctgatgaacaaaaataatgactaaacctaatcatgagcttagcccggcgctgatcgtgctgatgtctatcgccaccggtctggcggtagccagtaactattacgcccagccattgctcgacaccatcgcgcgtaacttttccctttccgccagtagcgcaggctttattgttaccgccgcgcagttgggctatgccgcaggtctactgtttcttgttcccctcggtgatatgtttgaacgccgccgcctgattgtcagcatgaccttactggcggcatgttgattaccgccagcagtcagtcgctggcgatgatgatcctcggtacggcattaaccggtttattcagtgtcgtggcacaaattctggttccgctggcagcgacgctggctagtccggataaacgcggcaaagtggttggcactattatgagcggtctgctgttggggatcttgctggcacggacagttgccggattgctggcgaatctcggcggctggcgcaccgtcttttgggttgctagcgtgttaatggcactgatggcgctggcattatggcgtggtctgccacaaatgaaaagtgaaacccacctcaactacccacagttgttgggttccgttttcagtatgtttatcagcgataaaattctgcgtacccgcgcgttgctgggctgcctgacctttgccaatttcagcattctctggaccagtatggcctttttgcttgccgctccaccttttaactacagcgatggtgtcattggtctgtttggacttgcgggagctgccggagcgttgggcgctcgtccggcgggcggttttgccgataagggcaaaagccaccacaccacaactttcggtctgctgctgctattacttagttggctggcgatctggtttggtcacacttccgtactggcgttgattatcggaatcctggtgctggatctcaccgtgcagggcgtgcatatcactaaccagacggtaatttatcggatacatcctgatgcgcgcaatcgcctgaccgcaggttacatgactagctactttattggcggtgccgccggtagcctaattagtgccagtgcctggcaacatggcggttgggctggcgtttgtctggctggcgcgacgattgccctggttaacttactggtctggtggcgaggttttcatcgtcaggaagccgcaaattaagcaatcagcaaccgttttcgtggctttacacttataagggtgttaagaagcccatcagtctgataaggttaagatattcattcagtctatttataatattaacaatcgttaagcgtacactctatggaaagccctactccacagcctgctcctggtagcgcgaccttcatggaaggatgcaaagacagtttaccgattgttattagttatattccggtggcctttgcgttcggtctgaatgcgacccgtctgggattctctcctctcgaaagcgtttttttctcctgcatcatttatgcaggcgcgagccagttcgtcattaccgcgatgctggcagccgggagtagtttgtggattgctgcactgaccgtcatggcaatggatgttcgccatgtgttgtatggcccgagtctgcgtagccgtattattcagcgtctgcaaaaaagcaaaaccgccctgtgggcgtttggcctgacggatgaggtttttgccgccgcaaccgcaaaactggtacgcaataatcgccgctggagcgagaactggatgatcggcattgccttcagtagttggagtagctgggtatttggtacggtaataggggcattctccggcagcggcttgctgcaaggttatcccgccgttgaagctgcattaggttttatgcttccggcactctttatgagtttcctgctcgcctctttccagcgcaaacaatctctttgcgttaccgcagcgttagttggtgcccttgcaggcgtaacgctattttctattcccgtcgccattctggcaggcattgtctgtggctgcctcactgcgttaatccaggcattctggcaaggagcgcccgatgagctatgaggttctgctgcttgggttactagttggcgtggcgaattattgcttccgctatttgccgctgcgcctgcgtgtgggtaatgcccgcccaaccaaacgtggcgcggtaggtattttgctcgacaccattggcatcgccagcatatgcgctctgctggttgtctctaccgcaccagaagtgatgcacgatacacgccgtttcgtgcccacgctggtcggcttcgcggtactgggtgccagtttctataaaacacgcagcattatcatcccaacactgcttagtgcgctggcctatgggctcgcctggaaagtgatggcgattatataacccacaagaatcatttttctaaaacaatacatttactttatttgtcactgtcgttactatatcggctgaaattaatgaggtcatacccaaatggatagtagctttacgcccattgaacaaatgctaaaatttcgcgccagccgccacgaagattttccttatcaggagatccttctgactcgtctttgcatgcacatgcaaagcaagctgctggagaaccgcaataaaatgctgaaggctcaggggattaacgagacgttgtttatggcgttgattacgctggagtctcaggaaaaccacagtattcagccttctgaattaagttgtgctcttggaagttcccgtaccaacgcgacgcgtattgccgatgaactggaaaaacgcggttggatcgaacgtcgtgaaagcgataacgatcgccgctgcctgcatctgcaattaacggaaaaaggtcacgagtttttgcgcgaggttttaccaccgcagcataactgcctgcatcaactctggtccgcgctcagcacaacagaaaaagatcagctcgagcaaatcacccgcaaattgctctcccgtctcgaccagatggaacaagacggtgtggttctcgaagcgatgagctaacgcgtcatctcgctcaaaaatccagatttataaaagaaaaaatgactggccagcatcgcaacatgctggcctttttggcaagcaggtcggctcagccgatgagttaagaagatcgtggagaacaatatgagcgcaaatgcggagactcaaaccccgcagcaaccggtaaagaagagcggcaaacgtaagcgtctgctcctccttctcaccttgctctttataattattgccgtagcgatagggatttattggtttttggtactgcgtcacttcgaagaaaccgatgacgcatacgtggcagggaatcaaattcaaattatgtctcaggtgtctggcagcgtgacgaaagtctgggccgataacaccgattttgtaaaagaaggcgacgtgctggtcactctcgacccgacagatgctcgccaggcgtttgaaaaagccaaaactgcactggcttccagcgttcgccaaacccaccagctgatgattaacagcaagcagttgcaggcgaatattgaggtgcagaaaatcgccctcgcgaaagcacaaagcgactacaaccgccgtgtgccgctgggcaatgccaacctgattggtcgcgaagagctgcaacacgcccgcgacgccgtcaccagtgcccaggcgcaactggacgtcgcgattcaacaatacaatgccaatcaggcgatgattctggggactaaactggaagatcagccagccgtgcaacaggctgccaccgaagtacgtaacgcctggctggcgctggagcgtactcgtattatcagtccgatgaccggttatgtctcccgccgcgcggtacagcctggggcgcaaattagcccaacgacgccgctgatggcggtcgttccagccaccaatatgtgggtggatgccaactttaaagagacgcagattgccaatatgcgtatcggtcagccggtcactatcaccacggatatttacggcgatgatgtgaaatacaccggtaaagtggttggtctggatatgggcacaggtagcgcgttcagtctgcttccagcgcaaaatgcgaccggtaactggatcaaagtcgttcagcgtctgcctgtgcgtatcgaactggaccagaaacagctggagcaatatccgctgcgtatcggtttgtccacgctggtgagcgtcaataccactaaccgtgacggtcaggtactggcaaataaagtacgttccactccggtagcggtaagcaccgcgcgtgaaatcagcctggcacctgtcaataaactgatcgacgatatcgtaaaagctaacgctggctaatccagaggtgcgtgtgatgcaacagcaaaaaccgctggaaggcgcgcaactggtcattatgacgattgcgctgagtctggcgacattcatgcaggtgctggactccaccattgctaacgtggcgatccccactatcgccgggaatctgggcagtagcctcagccagggaacgtgggtaatcacttctttcggggtggcgaatgccatcagcatcccgcttaccggctggctggcaaagcgcgtcggggaagtgaaactgttcctttggtccaccatcgcctttgctattgcgagctgggcgtgtggtgtctccagcagcctgaatatgctgatcttcttccgcgtgattcaggggattgtcgccgggccgttgatcccgcttagccaaagtctattgctgaataactacccgccagccaaacgcagcatcgcgctggcgttgtggagcatgacggtgattgtcgcgccaatttgcggcccgatcctcggcggttatatcagcgataattaccactggggctggatattcttcatcaacgtgccgattggcgtggcggtggtgttgatgacactgcaaactctgcgcggacgtgaaacccgcaccgaacggcggcggattgatgccgtggggctggcactgctggttattggtatcggcagcctgcagattatgctcgaccgcggtaaagagctggactggtttagtagtcaggaaattatcatccttaccgtggtggcggtggtggctatctgcttcctgattgtctgggagctgaccgacgataacccgatagtcgatctgagcttgtttaagagccgcaacttcaccatcggctgcttgtgtatcagcctcgcgtatatgctctacttcggcgctattgttctgctgccgcagttgttgcaggaggtctacggttacacggcgacctgggcaggtttggcctctgcgccggtagggattattccggtgatcctgagcccgattatcggccgcttcgcgcataaactggatatgcggcggctggtaaccttcagctttattatgtatgccgtctgcttctactggcgtgcctatacctttgaaccaggtatggattttggcgcgagcgcctggccgcagtttatccaggggtttgcggtggcctgcttctttatgccgctgaccaccattacgctgtctggtttgccaccggaacgactggcggcggcaagcagcctctctaactttacgcgaacgctggcggggtctatcggcacgagcataaccacgaccatgtggaccaaccgcgagagcatgcaccatgcgcagttgactgagagcgtaaacccgttcaacccgaatgcccaggcgatgtacagtcaactggaagggcttgggatgacgcaacagcaggcaagtggctggattgcccagcagatcaccaatcaggggctgattatttccgccaatgagatcttctggatgagtgccgggatattcctcgtcctgctggggctggtgtggtttgctaaaccgccatttggcgcaggtggcggcggaggcggtgcgcactaagtacaactaagccagttcatttgaactggcttttttcaattaattgtgaagatagtttactgattagatgtgcagttcctgcaacttctctttcggcagtgccagttcttcgttgctgttgatgcgtacgtcacgttccagaatgctacgcgcaatatcctgcgcttcctgcaagctgtgcatctggtaagtgccacactggtagacgttcagttccgggatctgattctgatcctgcactttcagcacgtcttccattgccgttttccaggcatcagcaacacgctgctcatctggcgtaccaatcagactcatataaaaaccggtgcggcagcccattgggctgatatcgataatctctacaccattaccgttaagatggttacgcataaaaccagcaaacaggtgctccagggtatggatccctctttctggcatcacttctttgttcggcacgcagaagcgcagatcgaacacggtgattgcgtcgccatgcggggtgttcattgttttcgccacccgaactgcaggcgcttccatccgggtatgatcgactgtgaagctatctaacaacggcatttagccacctccggtaatttttttaaaaattttctgaactctttcttcccaggcgagtctgagtatatgaaagacgcgcatttgttatcatcatccctgaattcagagatgaaattttggccactcacgagtggcctttttcttttctgtcaggcgtgtttttccagccacaccgcaaacggttcggtatcagcggcttccatttcctgctgacggcgttcagacgcctcgcgctcggctacaaaatcctcttcgcgcagaatttccagcggctcttcacgcagcagattacggtaggcttctgcaaatgctttgcctgttccgccaataccagtatcaatcatagaccttaagatacgggcagagaaagtcagatcgggattatcgaagcaggcaaccagttcatcacacactttctgatacgcttcgccgccgttaatactatccagcgtttgcgcgacgcgtttcagatcgcggaacagatctttacccacctgcggtaacgggaactgtgcggtttcgcagccgatacccagcgtcagacccggtttgcgaccttcgaggatcacccggttccagttaacgcgtgtacaggcaagttcgctactgctcatttccggtgcatcagccagcgcacaccagaccataaacaggtcgaggaatcgcacctgctgttcatctacaccaatcgggctgaacgggttgatgtccaggctacgcacttcaatatattcaatgccgccacgtaacagcgcatcagaagggctctcgccgctgcgggtaacgcgttttggacgaatcggcgcgtacagttcgttttcaatctgcaacacgttgctgttgatttgcagcctcttaccgtctttctcaataccaatcttcgcgtactcttcgcttggcgttttgattgcctgtttaaggcccgctacgtactcgtaaagatcgttgaaggtaataccaagattgctttggcttttattggtatagccgagatcgctcaaacgaagagaggtcgcatacggcaggtaatacataccgcactcggttttctcaaacggcaggctcgttggttttccttgcaggaaagaagaacaaatcgccggagatgcaccaaacagataaggaatgacccaaccgaaacgatagtaattgcggataacgcggaaatagcccgcagaaattttctctttggcatcagcgccgctgatatcaccgcacttcgcttgccagaatgccattggcaaagagaaattgtagtgcacgccggaaatggtttgcatcagcgcgccgtagcgatttttcagcccttcacgatacagcgttttaaagcgtccggtgttagaagtgccgtactgtgccagttcgatgtcctgaccttctgcgatgtagcatggcatacttaacggccacatccgctcatcgcccatattgcgcgccgtataacgatgcagatcgcgcataaaggtcagcatatgttcaatatcaccatccactggtgtaatgaattccagcaatgcttccgcaaaatcggtagtaatccatttgtgcgtcagtgcggaacctaatgcttcaggatgacctgttgttgccagtgtgccatcagcattaacacgcaaagtttcgcgctccagcccacgctgtatcccctttaacgcctgaggatgtttttccagccaggccagcgcctgacttacgtccgggatcaaattgacctcccgcctgtcaaaatcgttttaattagcataactgtaatggtgaccatatgtgcaggcctacaattagtgccaccacatcatgccctgaacggtcgctgctgcaactgcaacatagcgtaacgctttaccaaggcacaaaaaaaagattaccggtccccagctgatgcgcatccatcccgctaacagacacagtaaatcgccaaccacgggcatccagcttaataatagcgtgactgcaccatagcgtttcagccagccggtagctttctcttgccagcggcttgttttacgcaatggaaagaaacgcccaaggataacgttagttaaccctccaaggctattacccattgttgctgttaaaactaaaacccagggatgactgatcccggaaagcaacattgccaccagcacgacttcggagttgccgggtaatagtgtagcgctgagaaaactactggcaaacaagctgaaaaggcttaacgcttcactcacagcaagcgaacatccacggcgtccatgcctgctgcacgggccgcctgaataccgaaatcggcatcttcaaagaccacacactgcgtcggttgcacgcccatacgctgcgcgcacaacaaaaatgtgtctggcgcgggtttatggtgtttgacgtgatcggcagcgacgacggcgtcaaaataatggcgtaatcccaggtgcgccagcaatgcctcagcgatggcgctttcactccccgttcctacagccattgggcgacgaccatgccaacttttcaccacatcaacaagaggaagcggttcgacgctatccagcagcatacttcttactgcttctgttttttcacgcgctaacgcatgcgggtcgagatcggcctgattcagctcaataattgcctgagcaatacgccaggtggggcttccattaagcgcaatcatcgcctgaatatcgtactgaagaccgtagtgccctaatacttcgcgccacgctttacggtgcgtaggctccgtatccaggattgtgccatccatatcaaaaattaaacctgcataacgctcgtacatggtcttctcgcaagtcgaaaaatatgacgctactttagcgtaattgcttgattttgtcgctgatggcgaaggagaagaaaattcaggaaatggataaaggagttatttagaaatgagatatttttgaaggaaattttttggagaagatggtgcatccgggaggatgactcactgacgttcgcccttcgggccgttgctggcgcaacgttatccttcctggtgcctgcggttaataccgctatctcttcgataccttcattgctgaaggttacggagaatatggtgcatccgggaggattcgaacctccgaccgctcggttcgtagccgagtactctatccagctgagctacggatgcatcgggaaaacttattctactgctgatattgataccgctactaaagccatatcaattaagagatggtgcatccgggaggattactcgccttgcggctcgcccttcgggccgttgctaaagcaacgttatcatccctagtgcctgcggttaattccgctacctcttcgataccttcattgctgaagatttcggagaatatggtgcatccgggaggattcgaacctccgaccgctcggttcgtagccgagtactctatccagctgagctacggatgcatcgggaaatttattttactgctgatattgataccgctactaaagccatatcaagtaagagatggtgcatccgggaggattcgaacctccgaccgctcggttcgtagccgagtactctatccagctgagctacggatgcatcgggaaacttactttactgcagattttttgataccgctactaaagccgtatcaagtaagagatggtgcatccgggaggattactcgccttgcggctcgcccttcgggccgttgctaaagcaacgttatcctccctggtgcctgcggttattaccgccacctcttccataccttcatcgctgaaagtacgtagaatatggtgcatccgggaggattcgaacctccgaccgctcggttcgtagccgagtactctatccagctgagctacggatgcaaatggcggtgaggcggggattcgaaccccggatgcagcttttgaccgcatactcccttagcaggggagcgccttcagcctctcggccacctcaccacacgcctcttacgagtgcttcgaagaacttgtttatcgctcatcgtcgctgcgtggcgcacatattactttctgagacttataagtcaaacaatttttcctacacttttatcgtttgcacacttcacgttcaattagtctgtaaaaacgtcaaaaagagtgttttatcaacagaagaatggaggtctgacagatagtagtaatgcaaaaaaatggagacttaagttgaatgaacgggagtaaagcgaaaagactatagagtgaaggagaaattttgagggtgcgtctcaccgataaagatgagacgcggaaagattagtaactggactgctgggatttttcagcctggatacgctggtagatctcttcacggtgaacagaaacttccttcggggcatttacgccaatacgtacctggttgccctttacccctaaaactgtcacggtgacctcatccccaatcatgagggtctcaccaactcgacgagtcagaatcagcattctttgctccttgaaagattaaaagagtcgggtctctctgtatcccggcattatccatcatataacgccaaaaagtaagcaatgacaaacacattacatctaagcagtcatggcattacattctgttaaacctaagtttagccgatatacacaacttcaacctgactttatcgttgtcgatagcgttaatgcgaatgccgtgaagcgagtccacggcattgcctgacgcttatattattgcaatttcgcgctgacccagcctttcacactggctaacgctgcaggtaaggccgcagcatccgtaccaccggcttgcgccatgtcaggacgtccaccacccttgccgcccacctgctgagcgaccataccaatcagttcccctgctttcacacgatctgtgacgtccttagatacgcctgcaatcagagaaaccttaccttcgactaccgttgccagcacgataattgtgctccccagctgattttttaaatcgtcaaccatggtacgcaacattttcggctcaacaccgctaagctcgctaaccaacagcttaacaccattaacatcaattgccttactggaaagatttgcgctctcctgtgcggcagcttgttctttaagctgttgtaactctttttccagctgacgcgtacgttccagtacactgcgcactttatcagccagattattgctatcgcctttcagcagatgcgcgacttcgcttaagcgatcgctgtctgcatgaacggtggcgatagcaccttctccggttaccgcttcgatacgacgaacgcctgcagcagtaccgctttcagagatgatgcggaacagaccaatatcaccagtgcggctggcgtgagtaccgccacacaactcggtagagaaatcgcccatgctcagcacgcgtacgcgctcatcatacttctcgccgaacagcgccatcgcacctttcgctttcgccgcttcgagatccatgatgttggtttcgatcggcaaattgcgacgaatctgtgtgttcaccaggtcttcgaccgcacgaatctcttctggtttcatcgcttcgttgtgactgaagtcgaagcgcagcaccttgtcgttaaccagactacctttctggcttacatgagtacccagaacctggcgcagcgcagcgtgcatcaggtgcgttgcggagtgattcagacgaatacgggcgcgacgagcctcatcaacatcagcctgcaccgcgtcgcccactttcagagaacccgcagcaagtttaccgatgtgaccaatcgcctggccgtatttctgcgtatcttccaccgcaaaggagaagttagcgcctttcagttcgcctttatcgccaacctgaccgccggattccgcatagaatggcgtttgatccagcacgaccacagcttcctggcctgcattgatggcatcaaccgctttaccatcaacaaacagcgcagtcactttgccgttcagttccagatggtcatagcctttaaattcagatgcactgtcaacacggatcattgcgttgtaatcggcaccaaagccgctggcttcgcgcgcgcgacgacgctgctcttccattgcagcttcaaaaccagcttcgtcaactttgatgttgcgctcacgacaaacatcagccgtcaggtcaaccgggaagccataggtgtcgtacagacggaaagcagtttcaccatccagcgtatcaccagaaagttttgccagctcttcatccagcaacgccagaccgcgctccagagtacgagcaaactgctcttcttcagtcttcagcacctgctcaacctgcgcctgctggcgtttcaggtcttcacccgcagagcccataacgtcgatcagcggaccaaccagtttgtagaagaaggtttctttcgcgccgagcatattaccgtgacgcactgcgcgacgaatgatacgacgcagtacataaccacggttttcattggacggcattacgccatccgcgatcaggaacgcacaagaacgaatgtggtcagcgattacgcgcaggcttttattgctcagatcggttgcgccagtgactttcgctaccgcctggatcagcgtgcggaacaggtcgatgtcatagttagagttaacgtgttgcagcaccgcagcaatacgctccagacccataccggtatctacagacggcttcggcagcggttccatcgtgccatcggcctggcggttgaactgcatgaagacgatgttccagatctcaatgtagcggtcgccgtcttcttccgggcttcccggagggcccccccaaatgtggtcgccgtgatcgtagaagatttcggtgcacgggccgcacggaccagtgtcacccatctgccagaagttgtcagatgcgtatggcgcacctttgttatcgccgatgcgaataatacgttcgcgcgggatccctacttctttttcccagatttcgtaggcttcgtcgtcgctttcatagacggtaacccacagacgctctttcggcagggcaaaccatttttcgctggtcagcagttcccatgcaaactgaatggcatcgtgtttgaaatagtcgccgaagctgaagttgcccagcatttcgaagaaggtatggtgacgcgcggtgtaaccgacgttttccaggtcgttgtgtttaccacccgcacgcacgcagcgttgggaagtggtagcgcgggaataattacgcttgtcgagcccaaggaacacatccttgaactggttcatcccggcgttggtaaacaacaaagttgggtcgttatggggtaccagggagctgctggcaactacctgatgtcccttactatggaaaaagtcgagaaacgcctgacggatctcagcggtgctcttgctcataattatcctgaaatcaagctaacgaaatatcgccaccagctccagcgtgtcttaaccgccgggctggtaactgaaaagtgggaataagataagttttcttgactgggaagtaaaataccgtatgcgttcagtcggcaaaatttcgccaaatctcctggatatcttccatcagatagccacgatagagcagaaaacgctggatcttaactttttcactaaagacagttggcaaaggttcgccatattttcgcgtcgcctgatcgcgcgccagtgcgcaccagtcgatgtcacattcacgcatcgctttttctgtcgcttcgcgggaaatacctttctgattcagttcctggcgaatacgcgcaggtccataacctttgcggctacggctggcgataaagcgcgcaacaaatcggctgtcatcgagatagccatgttcatggcaccaggcaataacgcgctcgtaatcttctgccgtagcatcaatctcttctgggccatttttgcccataatcggtgccgcgagtttacgtcgcagttcttgctcactgtgatcgcgcaccgccagaatgcgtaccgcacgatccaacaggcgagcatatgccgggcgacgggatgtactttctgtcatggcatatccttacaacttaaaaaagcaaaagggccgcagatgcgacccttgtgtatcaaacaagacgattaaaaatcttcgttagtttctgctacgccttcgctatcatctacagagaaatccggcgtactgttcgggttgctcagcagcaactcacgtactttcttctcgatctctttcgcggtttccgggttatctttcagccaggcagtcgcattcgctttaccctgaccgatcttctcacctttgtagctgtaccacgcgcctgctttctcgatcagcttctcttttacgcccaggtcaaccagttcgccgtagaagttgataccttcgccgtagaggatctggaattcagcctgtttaaacggcgcagcgattttgttcttcaccactttcacgcgggtttcgctacccaccacgttttcgccctctttcaccgcgccgatacgacggatgtcgagacgaacagaggcgtagaatttcagcgcgttaccaccggtagtggtttccgggttaccgaacatcacaccaattttcatacggatctggttgatgaagatcagcagcgtgttggactgcttcaggttacccgccagcttacgcatcgcctggctcatcatacgtgccgcaaggcccatgtgagagtcgccgatttcgccttcgatttccgctttcggcgtcagtgccgccacggagtcaacgacgataacgtctactgcgccagaacgcgccagggcgtcacagatttccagtgcctgctcgccggtgtccggctgggagcacagcaggttgtcgatatcgacgcccagtttacgtgcgtagattgggtccagcgcgtgttcagcatcgataaacgcacaggttttaccttcacgctgcgctgcggcgatcacctgcagcgtcagcgtggttttaccggaagattccggtccgtagatttcgacgatacggcccatcggcagaccacctgccccaagcgcgatatccagactaaggctaccggtagagatggtttccacatccatggaacggtcttcacccaggcgcatgatggagcctttaccaaattgtttctcaatctggcccagtgctgccgccaacgctttctgtttgttttcgtcgatagccatttttactcctgtcatgccgggtaataccggatagtcaatatgttctgttgaagcaattatactgtatgctcatacagtatcaagtgttttgtagaaattgttgccacaaggtctgcaatgcatacgcagtagcctgacgacgcaccgcatcacggtcgccgctgaagcattcccgccgggtaatgccttcaccgcgggcagtggcaaaagcaaaccagacggtgccgacaggcttctcttcactgccgccatccggcccggcgataccactaatagacacggcataatcagcacgagccgctttcagtgcgcctatcgccatttccaccacgacgggttcactcaccgcgccatgctgcgccagcgtctcttcgcgtacgccgatcatctgcgctttggcttcgttactgtaggtgacaaatccgcgttcaaaccaggcggagctaccggcaatatcggtaatcactttcgctacccaaccaccggtacaagactcggcagttgttacggttgcgccacgggctttcagcgcctgcccaacctgttcacttaactgcatcagttcactgtcagtcatcacaacctctgtcagtcaaaaatttatgccggacaagatagcactttcgtcaggaagatggtgttggcgttgcaattttacgaggaggattcagaaaaaagctgattagccagagggaagctcacgcccccctcttgtaaatagttactgtactcgcgccagcgccacggcttgtcctaactgccagaccgccattgcgtaatgggtgctgtggttgtaacgggtgatggtgtagaagttcggcagaccgtaccagtactggtagccggtgccaacatccagacgcagcaggctggcttgttgatggttgcccagcggctgctgtggcgttaaacctgcggcggcaagctggctaatgctgtacttagttttgaagccatttggcaagcctggagcctgaccgtttgccattaccgcgacctgatcgcctttcacccagccgtgcgctttgaaatagttcgccacgctaccgatcgcatcaaccggatcccacaggttgatatgcccgtcgccgctgaaatctaccgcatattgtttgtaagagctcggcataaactgtccgtagcccatcgccccggcaaaggaacctttcagattgagcggatcgtcctgctcgtcgcgcgccatcaacaggaaggtttccagctcgccagagaaatactccgcgcggcgtgggtagttaaaactcagcgttgccagcgcatcgaggatgcgagttttccccatcacgcgcccccagcgggtttcaacgccgataatcccgacgataatttccggcggtactccatacacctgccacgcgcgattcaacgcatcttcatactgattccagaaaaccacaccgttctgcacgttgtccggcgtaataaattttttgcgataacggagccatgcgccgttcggaccacttggcggtttcacgcttgtggttggtgcctggttatccatcagccgcagtacgctatccagacgcttcgcctgggagagaatttcctgcaactgctgacgatcgaaaccgtgtttgttcaccattttgtcgatgaactgctgggcattcgggttattagcgaaatcgccgcccatctgcatcacattgtgctgcggctcaagcaggaagccgccagacggcgttccggtggtcgtatcagtctcagtaggttttggcttgctgctacaggcggcaagcaacacaaaaaggggaagcaatgttacataacgacgcttgaacatgaggggtccatttaacagattcaaccaggggcaagtatggtaaagcatcacgccccgcacaaggaagcggtagtcactgcccgatacggactttacataactcaactcattcccctcgctatccttttattcaaactttcaaattaaaatatttatctttcattttgcgatcaaaataacacttttaaatctttcaatctgattagattaggttgccgtttggtaataaaacaataaatcctgaaggagagaacaatgatagaaaccattactcatggtgcagagtggtttatcgggctgttccaaaagggcggagaggtgtttaccgggatggtgaccggcattcttccgctgttgattagcctgctggttatcatgaacgcactgattaattttatcggtcagcatcgtattgaacgttttgctcaacgttgcgccggtaaccctgtttcccgttacctactgttaccgtgcattggcacgtttgtcttttgcaatccgatgaccctaagcctgggtcgctttatgccggaaaagtacaaacccagctactacgcggcggcctcttatagctgccacagtatgaatggcctcttcccccatatcaaccctggcgaactgtttgtttatcttggcattgccagcggtctgacaacgctgaacctgccacttggcccactggcggtgagttatctgctggttggtctggtcaccaatttcttccgcggctgggtgaccgatctgaccaccgccatttttgagaaaaagatgggcattcaacttgaacaaaaagttcacctggcaggagcaacaagttgaaataacacctggcaggagcaacatcatgacgcatattcggatcgaaaaaggaacgggtggctggggcggcccgcttgagctgaaagccacgccgggaaaaaaaatcgtctatatcaccgccggtacccggcctgcgattgttgacaaactggcacagcttactggctggcaggctattgacggatttaaagaaggtgaacccgcggaggtggaaattggtgtcgcggtaatcgactgtggcggcacattacgctgcggcatctatccgaaacgacgtattcccaccattaatatccacagcacgggcaagtccggtccgctggcgcagtacattgtggaagatatttatgtctctggcgtaaaagaagaaaacatcactgtagtaggtgatgcgacaccacaaccctcttccgtgggccgtgactatgacaccagtaagaaaatcaccgaacaaagcgatggtttactggcgaaggtgggaatgggcatggggtccaccgttgcggtgctgtttcaatctggtcgtgacaccatcgacactgtattaaaaaccattctgccgtttatggcattcgtcagcgcgctcattggcatcattatggcttctggccttggtgactggattgcccacggtcttgctccgctggcgagccatccactgggtctggtcatgctggcgctcatctgttccttcccactgcttagtcctttcctcggcccaggcgcagttatcgcacaggttatcggcgtattgattggcgtgcagattggtctcggcaatattccgccgcatctggctttaccggcactgtttgccatcaacgcgcaggcggcctgcgacttcatcccggtcggtttgagcctggcggaagcccgtcaggacacggttcgcgtcggtgtcccttctgtactggtgagccgctttttaaccggcgcgccgactgtactgatcgcctggtttgtctccggttttatctatcaataaaggctgaaacatgaccgttatttatcagaccaccatcacccgtatcggcgcgagtgccattgacgccctcagtgaccagatgctcatcacctttcgtgaaggcgcgcctgcggacctcgaagagtattgcttcattcattgccacggcgagttgaaaggtgcactccatcccggtttgcaatttagtctcgggcagcatcgctatccggtgaccgctgttggcagcgtggcggaagacaaccttcgcgaactgggtcatgtcaccctgcgcttcgatggtttaaacgaagcggaatttccgggcactgtccatgtggcaggccctgtccccgacgatatcgcgccgggaagcgttttgaagtttgaatctgttaaggagtaaaaaatgaatcaggttgccgttgtcatcggtggtgggcaaaccttaggcgcgttcctgtgccacggtctggctgccgaggggtatcgcgtcgcggttgtcgatattcagagcgacaaagccgcaaatgtggcacaagaaattaacgccgaatatggtgaaagtatggcgtacggttttggtgctgacgccactagcgagcaaagcgttctggcgctctctcgtggggtagatgaaatctttggtcgcgtggatttgctggtctacagcgccggaatagcaaaagcagcctttatcagcgacttccagctcggcgattttgaccgtagcctacaggtgaatctggtgggttatttcctgtgtgcgcgtgaatttagccgtttgatgatccgcgacgggattcaggggcgcattattcagatcaacagcaaatccggcaaagtgggcagcaaacacaactctggctacagcgcagcgaaatttggtggcgtcgggctgactcaaagtctggcgctggatctggcggagtacggcattacggtgcatagtctgatgctcggtaacctgctgaaaagcccgatgttccagagtctgttgccacaatacgcgaccaagctgggtatcaaaccggatcaagtcgagcagtattacatcgacaaagtaccgctcaaacgcggctgcgattatcaagatgtgctgaatatgctgctgttctacgccagtcctaaggcgagctactgcaccggacagagcatcaatgtcaccggcggtcaggtgatgttctgatcaacagcggagatccattaaggatctccgtgagactatagaatgcctgatgcgctacgctcatcaggcatacaggacttccgccactacattaaggaaaagttatggtatccgcactcatcaccgtcgccgttatcgcctggtgtgcgcaactggccttaggcggctggcaaatttctcgttttaaccgtgccttcgacacactatgccagcaagggcgggttggcgtgggccgttccagcgggcgctttaaaccgcgggtcgtggtcgccatcgcgctggacgatcagcagcgcatcgtcgacaccttgtttatgaaaggactgaccgtcttcgcccgaccgcaaaaaattcccgcaattaccggtatgcatgcgggtgatttacagcccgatgtgatctttccccatgatccactaagtcagaatgctctaagtttggcgcttaaactgaaacgtggataatttcgttgtgaatgttacttgcttgcgaagttatcattttgaaacctaaatcaggtaatcacgcccatgaaacctcgtcagcgtcaggccgccattctggagtatctgcaaaagcagggtaaatgcagcgttgaagaattggcgcaatactttgacaccacaggcacaaccattcgcaaagatctggtcattctggaacatgccggaaccgtcattcgtacttatggcggagtggtgttgaataaagaggaatccgatccgcctatcgatcataaaacactcatcaacacccacaagaaagagctgattgcagaagctgccgttagttttatccatgatggcgatagcatcattcttgatgctggcagtaccgttttgcagatggttcccctgctcagccgctttaataacatcacggtgatgaccaacagcctgcatatcgtcaatgcgctatccgaactggataacgaacaaactatcctgatgccaggcggaacgtttcgcaaaaaaagcgccagttttcacgggcaactggcagagaatgccttcgagcatttcaccttcgataaattgtttatgggcaccgacggcatcgatctcaatgcgggcgtaaccacctttaacgaggtttataccgtcagtaaggcaatgtgcaatgccgcgcgcgaagtgattttgatggcggacagtagtaagtttggccgtaaaagccccaacgtagtttgcagtcttgaaagcgtcgataagctgattaccgacgcaggtatcgatccggcgtttcgtcaggcgctggaagagaaagggatcgatgtgatcataaccggagagagcaatgagtgaagcactactgaacgcgggacgtcagacgttaatgctggagttgcaggaagcaagccgtttaccggaacgtctgggcgatgattttgttcgcgccgccaatatcatcctgcactgtgaaggcaaagtggtggttagcggaattggcaaaagcggccacattggtaagaaaatcgccgcaacgcttgccagtaccggcactccggctttttttgtccatccggcagaagcgctgcacggcgatctggggatgatcgaaagccgcgatgtgatgctgtttatctcttactccggtggcgcgaaggaactggatctgattattccgcgtctggaagataaatctatcgcgctgctggcgatgaccggcaaaccgacgagtccgctgggcctggcggcaaaagcggtgctggatatctccgtagaacgcgaagcctgcccgatgcaccttgcgccgacctccagcaccgtcaataccctgatgatgggtgacgcgctggcgatggcggtcatgcaggcgcgcggatttaatgaagaagattttgcccgctcccacccagccggggcactgggcgctcgcttgctgaataaagtgcatcatctgatgcgccgtgacgatgccatcccacaggtggcgttaaccgccagcgtgatggatgcgatgctggaactcagccgcaccggtctggggctggtggcggtatgtgacgctcaacaacaggtacaaggcgtctttaccgacggcgatttacgtcgctggctggttggcggcggcgcactcaccacgccagtcaatgaagcgatgacggtcggcggcaccacgttgcaaagccaaagtcgcgccatcgacgccaaagagatcctgatgaagcgcaaaatcactgccgcaccggtggtggatgaaaacggcaaactcaccggcgcaataaacctgcaggatttctatcaggccgggattatttaatccttcaatcccagacgtttcgccagccgatgcaggttggcgacgtcggtttccagcatccgcgcgcaggcagcccagttgtgatgattttgtgccagtgcctgacgaatagtttcacgctggaacgcttctgtcgcttcacgcaggttttgcttaacaacgggcaccgccgccacttctggcgtcggcaacgtcacctcaggaaaagcaaaatgttgcgcctcaagaatcacttcatcgccgctgcgggtggctctcgccagaactaccgcccgatgaatagcatgttccagttcgcgcacgtttcccggaaaactgtagtgttgcagtaaatttcgcgctccggcacttaataccacgcgggagagcccctgccgcaaacgacactgctcgcagaaataccccgccagcagaatgacatcatcgccccgctcacgcagcggcggcacgctaagtggaaacacgctcaggcgatgaaacaaatcggcgcggaatcgccctgccagcacctcttcgcgtaaatcgcggttagtcgccgccagcacgcgcacatcgacccgcaaacaacggtcatcgccaacgcgctgaatatcgccatactgcaacaccctcagcagcttggcctgcaatgccaagctcaactcgccgatctcatccagaaacagcgtgccgttatccgccatttcaaacttcccgctgcgattactgatagcgccagtaaacgctcctttcacatgcccgaacaactcactttccgccacactttccggcagtgcagcacagttgagatagaccagcggattcaccgcccgtgggctggcttcatgaatcgctttcgccaccagctccttaccggttccagtctcaccgctgatcaggacgttgagatcggacgccgccacaatctcaatctcttttttcagttgcgtcatgccaggggacaagccaatcatctgcgtctgtttcaccgcttcaaacggcgtggcatcgcctggcagcatattctggctttccagttgttcaatcagcaacgcattgcttaacgctcccgccgccagcgcagcaatcagccgtagctcttcgtcgctgaaaacatcgaactgatcgggctgcatcccgtcgagcgtcagtgcgccgatcaggttttgcccggcaaacaatggcagaccaacgcaggcgtgaaccttcagactctcctgcccaggaatcaaaccgtcatagggatcgggcaattcgctgtctgcgggaaagcgcaccacatccccggcgcgggcaatcgcttccagccgtggatgcccttccagcgcaaagcgtctaccgagtacatcctttgccagaccgtcgatggcaagcggaataaactgccggctatcgtaacgtagcaacgcagacgcatcgcactccagcacctgacgtagcgtggtgatcaggcgctgaaaacgatcctggtgaccaatcccacgctgcaattcgatggcgatattcgccagcacatcaacggaaaaactcatctttgcctcactgtcaatttgactatagatattgtcatatcgaccatttgattgatagtcattttgactactcattaatgggcataattttatttatagagtaaaaacaatcagataaaaaactggcacgcaatctgcaattagcaagacatctttttagaacacgctgaataaattgaggttgctatgtctattgtggtgaaaaataacattcattgggttggtcaacgtgactgggaagtgcgtgattttcacggcacggaatataaaacgctgcgcggcagcagctacaatagctacctcatccgcgaagaaaaaaacgtgctgatcgacaccgtcgaccataaattcagccgcgaatttgtgcagaacctgcgtaatgaaatcgatctggcggatatcgattacatcgtgattaaccatgcagaagaggaccacgctggggcgctgaccgaactgatggcacaaattcccgatacgccgatctactgtacagccaacgctatcgacagcataaatggtcatcaccatcatccggagtggaattttaatgtggtgaaaactggcgacacgctggatatcggcaacggcaaacagctcatttttgtcgaaacaccaatgctgcactggccggacagcatgatgacttacctgacaggcgacgcggtgctgttcagtaacgatgctttcggtcaacactactgcgacgagcatctgttcaacgatgaagtggatcagacggagcttttcgagcagtgccagcgttactacgccaatatcctgacgccgttcagccgcctggtaacaccgaaaattaccgagatcctgggctttaacttaccagtcgatatgatagccacttcccacggcgtggtatggcgcgataacccgacgcaaattgtcgagctgtacctgaaatgggcggctgattatcaggaagacagaatcaccattttctacgacaccatgagcaataacacccgcatgatggctgacgctatcgcccaggggattgcggaaaccgacccacgcgtggcggtgaaaattttcaacgtcgcccgaagcgataaaaacgaaatcctgactaatgtcttccgcagtaaaggcgtgctggtcggcactagcacgatgaataacgtgatgatgccgaaaatcgccgggctggtggaggagatgactggtttacgcttccgtaacaaacgcgccagtgctttcggctctcacggctggagcggcggtgcggtggatcgtctttccacgcgcctgcaggatgcgggtttcgaaatgagccttagcctgaaagcgaaatggcgaccagaccaggacgctctgaagttatgccgtgaacacggtcgcgaaatcgcccgtcagtgggcgctcgcgccgctgccgcagagcacggtgaatacggtagttaaagaagaaacctctgccaccacgacggctgacctcggcccacggatgcagtgcagcgtctgccagtggatttacgatccggcaaaaggcgagccaatgcaggacgttgcgccaggaacgccgtggagtgaagtcccggataacttcctctgcccggaatgctccctcggcaaagacgtctttgaagaactggcaagcgaggcaaaatgagtaacggcattgtgatcatcggtagcggcttcgccgcccgccaactggtgaaaaatattcgcaaacaggacgccactattccattaaccctgattgccgccgacagcatggatgagtacaacaaacctgacctcagccatgttatcagtcaggggcaacgtgccgatgaccttacccgccagacggcgggtgaatttgccgagcagtttaatctgcacctgtttccacaaacctgggtgacggatatcgatgccgaagcccgtgtggtgaaaagccagaataatcagtggcaatacgacaagctagtactggcaaccggtgccagtgcctttgtcccgcctgtgcctgggcgtgagttaatgctgacgttaaatagtcagcaagagtatcgcgcctgtgaaacgcaactgcgggatgcccgacgcgtgttgattgttggcggtggtttgattggtagcgaactggcgatggatttttgtcgtgcaggcaaagcggtcacgctaatcgacaacgctgccagtattctggcgagcttaatgccaccggaagtaagcagccgcttgcagcatcggttgacggagatgggcgttcatctgctgttgaaatctcagttacaggggctggaaaaaacggattctggcattcaggcaacgctggaccgccagcgcaatatcgaagtggatgcggtaattgccgccaccggactgcgcccggaaaccgccctggcacgacgcgccgggctgacgattaatcgcggcgtttgcgtcgatagttatctgcaaaccagtaataccgatatttacgcgctgggcgattgcgcggaaattaacggtcaggtattgccgttcctccagccgattcaacttagcgcgatggtgctggcaaaaaatcttctcggcaataacacgccgctgaaactcccggcgatgctggtgaaaatcaaaacgccggaattaccgctgcatctggcaggcgaaacccagcgtcaggatttacgctggcaaattaataccgaacgccagggaatggtggcgcgcggcgttgacgatgctgaccagcttcgcgcctttgtggtcagtgaggatcggatgaaagaggcatttggattgttgaaaacattgccgatgtaagtgggctactgtgcctaaaatgtcggatgcgacgctggcgcgtcttatccgacctacggggacgcatgtgtaggccggataaggcgtttacgccgcatccggcaatggtgtccaaatgcaacacgttttatccgttctggacttcacccgctaaccaacgcgccgcagcaataaccccctgccccagagacaaaccgccatcacccgccggtaaactctgtggaaagagcaatgtgaaatcagcgagataatgcgccagacgtgcacgcagcaaacggttatgaataaccccgccgctaaataccagcgtagtgataccacgcatcgtggcctgctcacgcatcaacgcggcaaaaccctgcgccagcgtatcatgaaacgcccacgcgcgttgattaaccggtgcctgccagttcagccactgctgccagaaagtggcgagatccagttgattgtccacccgcggcattgtcaccggatgcgtcactccgtggcaactggctgcgagcgcctccagagcacaagccgcttcaccttcataacttaacgtggctggcgcacagcccagtgccgccgccactgcatcgaaaaaacgcccacagctactcgccagcggcgcgttaattccacgctcaatggcccgcgccagcacgctccagttttgctgttgcacacttgctgtttcagagtaattctgccactccggcacaaagcgcaggcactgcgccagcaggtttcgccacggctgcttcgctgccaaatcgccacccggaagcgccactgcaggcaagccgcccaggtgctcacattcgcgatagttcacccgcaggcactcgccgccccacaaagcgccgttctcccccataccgataccgtcgagcgtcaaagcaatgacatcaccgccatccagcggccactgatgctctgccagacacgccgctgcatgggcatgatgatgcagtaccgtttgcgtcggcagattcatttcacgcgcccactggctggagacatagcccggatgcgcgtcatgcacaacgtattgcggggtaaaatcgtagatgttttgcatcaggcgtaacgcttcgcgccactgcatctggatgccatcgtcacttaaatcgcccagatgctgactcaacaccgcttgttcaccgcgcaccaggcagaaggtatttttcagatccgcgccgagacacagcacaggcggaacatttttaaagcccggaggcaaagccagcgcatccggcacatacccccggctacggcgcagcatttcgccgctttcgcgcaccacgctatcatccatccgctgcacgatgtcgcggttatgtatcaagaatccgtcggcaatgccctgcaaatccgccagcgcctgttcgttgctgatagctggtggtttaccgctcaggttgccggaggtcatcaccagcgggcattgcagttcctgtaacagcaaatgctggagcgggttcgcaggcaacattaccccgacttcgttaaggtcaggggcgatatcatcacaaagctcaggaacgtattttttatccaccagcacaatcggcgcggcgggcgtggtaagcaactggcgcgcagcgtctggtaaaccgtcagccactggcaacatgaccgccagcggtttcgccgggcgatgtttgcgcgcccgaagtgtcgccaccgcgttactgttacgtgcatcgcaggcaagatgaaatccgccaatccctttgatggcgacaattttgcccatttttaactgtgcgatagctgcctgtaatgccgcctcttgttccgcatgttcaccatgacttacccattcaagatgcgggccacactccgggcaggccaccggctgggcgtggaagcgacgatcgagcgggtcacggtactctttgtcacaggccggacatagcggaaacgccgccatcacggtaaacgggcggtcgtaaggcatggcgcgaataatggtgaaacgcgggccgcagtgggtacagttgataaacggataacgataacgccgttcgcctggggtattcatttcggcaaggcaagcagggcaagtagcggcatcgggaacaatttgcgtattcatggtgccgcctgtgctctggcgtatagtgaactcggtgggcagttgactccagataaacggctcacgctcgacgctatcaatacgcgccagcggcgggcagtgctgatacaattgaacaagaaacgtttccgggtcttcccgcagccggacttctacgccatcgccgtcattacagacatcgccgtgaagatttaattgctgtgccagctgccagacaaacggacgaaaaccgacgccctgcactttgccacgaatacgcagttggacaccgcaagatgtgttttttgccattgagttattcccgccatcatgaattgcgtaacccgccctgccggacacgacagcgtcgcatccggcagtcacaggtcggcgataccgcccgctccgtattctacgaatatttccgggaattcctttgatgccagaacagttctgtaagatttttagaacatcagcgccgtacggcggcgtttttctgcgctcagttgttcaagtttattacgatcgacacaaatcagcgcatgagtcgggcaagccgccatacacgccgggccgtcttcacgatggttgcacaggtcgcatttattggcttcggctttgtcagcccgtacattcagacccgcgccgctgttgcggatcaccggacgtaccaccacttccatcgcaccatacgggcaagccacaacgcaggttttgcaaccaatgcaacgttcctgcatcacatgaacaaaccctttatcacggctgatagcaccattcgggcagacgttagcgcacggtgcatcttcacactgacggcaaactgtcgccgtggaaatgttcacacctttaatgacatggatacgcggtaaaaaagtttccggggtcaggcttgcacagtcctgattttcctgatgagaaaccacgcacgctacttcacaggtacggcaaccaatacatttactcgcgtcagcaatgatgaaacggttcatcaaattctccagcaatgacagttaatgcgccgatacattcacaaatcatgccagtttttaatttactgttatttaaggaaattaatttctgtaatgcaggaaaaacgatgtcatcgacactagtgacgatgacatgtgatgacaatgtttatcggctaggagcaatgagactgtcgcggcggatcagttttccgctgaaggttttcggcggactgaaatccccgccatcgagcataaaaatcagccgtccaataatttcctgaatcatctcagtcaccggaatttttacgctggagagcgccggaacggtgtagggggcaatagcgatatcatcgaatccgataacactcacctgctctggcaccgctacgccgcgctcgtgtaacgctttcatcgcacctatcgccatatcgtcgttactggcaactaacgcgctaaatttagccccacgttcgagcaacatttctaccccttcggccccgctggcaggcgtccatttaccgttagcgataagtttttcattgagcgcaataccatgctgcgccagcgcgtctttatacccggcaagacgttcaatgttggtgggggaatccatgctgccggtaaggaaagcaatctcctgatgcccggcgtttatcaactctgccacggcgttaaaactggtctgtttatgatcgcaccagacgctatggctgctgtttttgcgcaggcggcgattaagcaccattatcggctgactgtgcgcgtcaatgatgtcatcgatctcatccacgcttaaaaaacgcgggtaaatcatgatcgcgtcgcagcgcagatccagcagatactgaatcgcctggcgctcttcttctgcgctgtgtttaccatctgccaatagcaactgccgccctttctcttccgccattcgcgcggcatgaaagagtaattcactaaaataaatgccgtggtaaagcgtgttggtcactaccagccccagcgtctgagtactcttcgcgctcagattgcgcgccagcaagtttggacggtaaccgctctcttctaccgcctgaaacacgcgatctttagtctcctggctgacgtagccattaccactaagcacgcgggaaacggtcgctttactaaccccggcgcgcttcgccacttccagcatcgtcgtcatcattttcatccctttacacgcaatcaacgcagtgtactgcaccgtttgccgattgtccttgcacaatcggcgggaaaaatattcaggtgaccggtttcacaaatataaaaaatgaacaattcactctcttgcttatttagtgacaactattcatgattttgtgaaaccggtttcttaattccgtttcagcatcggcatttttccgtcacgtcgactgataacaactacatctaccctactgataacaggataaaatccgatggccaaaaattatgcggcgctggcacgcagcgtgatagcggcactgggcggcgttgataacatcagcgcggtcacgcactgtatgacgcggttgcgctttgttatcaaagatgatgcacttatcgacagcccgacgttaaaaaccatccccggcgtgctcggcgtggtacgtagtgacaaccagtgtcaggtgattatcggcaataccgttagtcaagcctttcaggaagtcgtcagcctgctgccgggagatatgcagcccgcacagcccgtgggtaaacccaaactcacgctacgtcgcattggtgcggggatcctcgatgcgctgatcggcaccatgagtccgctgatcccggcgattatcggcggaagcatggtcaaactgctggcaatgatcctcgagatgagcggcgtgctgacaaaaggaagcccgaccttaaccattctgaatgtgattggtgacggtgctttcttcttcctgccgctgatggtcgcggcatctgccgccatcaaatttaaaaccaatatgagcctggcgattgccatcgcgggtgtgctggtacatccgagttttattgaactgatggcgaaagcggcccagggtgaacatgtcgaatttgccctgattccggtcaccgcggtgaaatacacctacacggtgatcccggcgctggtgatgacctggtgcctgagttatatcgaacgctgggtggacagcattacaccggcggtgaccaaaaacttcctcaaaccaatgctgattgtgttgattgccgcaccgctggcaatcctgctgattggcccgattggtatctggatcggtagcgccattagcgcgctggtttacaccattcatggttatctgggctggcttagtgtcgccattatgggcgcgctgtggcctctgctggtaatgaccgggatgcaccgcgtctttacgccaaccatcattcagaccattgccgaaaccggcaaagaagggatggtcatgccgagtgagatcggcgctaacctgagcctgggcggtagtagtctggcagtggcgtggaaaacgaaaaacccggaactgcgtcagacggcgctggctgcggcggcaagtgccattatggcggggatttccgaaccggcgttatatggcgtggcgatccgcctgaaacgtccgcttatcgccagtcttatcagcggttttatttgcggcgcggttgccggtatggcggggcttgccagccacagtatggcagcgccggggctatttaccagcgtgcagttcttcgatccggcgaatccaatgagcatcgtctgggtgttcgcggtcatggcgctggcggtggtgctgagctttatcctcacactgttgctcggctttgaggatattcctgttgaggaagcggctgcccaggcgcgaaagtatcagagcgtacaaccgaccgtcgccaaagaagtaagtcttaattgaggatgaaaatgagtgtatttccagaaagttttttatggggcggcgcgcttgccgccaaccagtctgaaggtgcgttccgtgaaggtgacaaaggtctgaccactgtcgatatgatcccacacggcgagcatcgaatggcggtgaaactggggctggaaaaacgttttcagttgcgagatgacgagttttatcccagccatgaggcgacggatttttatcatcgttataaagaagatatcgccctgatggcagagatgggattcaaggttttccgtaccagtattgcctggagccgtctctttccgcagggcgatgaaatcacgcccaatcagcagggcattgctttttatcgttctgtctttgaagagtgtaaaaagtacggtatcgaaccgctggtcacgttgtgccacttcgatgtgccgatgcatctggtcaccgaatatggctcctggcgtaaccgcaagctggtggagtttttcagccgctacgccagaacctgctttgaagcatttgatggtctggtgaaatactggctaaccttcaatgaaatcaacattatgttgcatagcccgttctccggcgcgggtctggtgtttgaagaaggtgaaaatcaggatcaggtgaaatatcaggccgcgcatcaccagctggttgccagtgcgctagccaccaaaatcgcccatgaggttaacccgcaaaatcaggtgggctgtatgctggcgggcggtaacttctacccttacagttgcaagccggaagatgtctgggcggcgctggagaaagaccgggaaaacctgttttttatcgatgtgcaggcgcggggcacgtatccggcttactctgcccgcgtattccgcgaaaaaggggtaaccatcaacaaagcaccgggcgatgatgaaatcctgaaaaacaccgtcgattttgtctctttcagctattacgccagccgctgcgccagcgcggagatgaacgccaacaacagcagtgcggcgaacgtggtgaaaagcctgcgtaatccgtatctacaggtgagcgactggggctggggaattgatccactcggtctgcgtatcaccatgaatatgatgtacgatcgttatcagaagccgctgtttctggtggaaaacggcctgggcgcaaaagatgaatttgctgccaatggcgagattaacgacgactatcgcatcagctacttacgcgaacatatccgcgcaatgggcgaagcgattgcagacggcattccgctgatgggctacaccacatggggctgtattgatttagtttccgcctctacgggtgaaatgagcaaacgctacggctttgtctttgttgaccgtgacgacgcaggcaacggtacgctgacgcgcacgcgtaagaaaagtttctggtggtataaaaaagtgattgccagtaatggggaagatttagagtaagtaacagtgccggatgcggcgtgaacgccttatccggcctacatgtcgcacgaaccatgaaggcccgataagcgcagcgcatcgggcaatttagcatttggcatcagagctggttcaccccatcaagaacatccctgtcctgattccttaatgaaaaattactcttcttccaccgctaactgcgcgaagccgccatttccttcccagccttccagtcgttgataaacggtttctaccgcatctttaatcggctgggtcatcgggtagtaaaagccgacgatatccggctgaatgccgaggaaaatcacttcgccaatatcttctttcaactggtcgataaggtaattcaacggcatgttatgggtagtcatcataaacatctcggcgatatcatccgggtcgatgatgcggatctcgccggggtttagccccatatccgtggcgtcgacaatcagcagtcgtgtcgggcgcagttcacggatagcgacgatgtcgttttccggtgcgctaccgccgtcaatcaccacccagttacctttcggcgcggcggcgcacttttccgccagcagcggacctgcgccatcatcgcccatcatgctattgccaacacagagtaaaacgtcagtcacgcagtctcctcaccatcaaatagatggcgttttcctgatgaatatcatgcagcatacttaacagcattgtactccattcctgctgctggctagtttgcgctgcccgggctttatcgaatgcgttggccagcatcggcacatggttaatgtcgatgacgatctcaccatatttcggcacgccttccattttgcggcgggcttcactgcctgcctccagagtggcaatccatgccagatattcatcccacgggcaggtgagcgccgcttccaggcaatcgataaccccaaggtggtgaccaatcgccaggctgtaatagaccacctgctgcgcctcggcgggcgtggcatcgttctcatcaataaatttatggctcagttgactgaacaccaccttttcactcatcggatacgcgcctcttcaacaacatgattcagatggctgacaatctcgttcagacgcggatcgttttccgcttccagccagcgtgcaacctgttcttcgccctgccctaactgtgtaaggtaatcatcggcaatctgacgaccgtaacgataacccgccaggcgacgtgcttcgcgatccactttcacgcgcagcggctgcaccatatcaccatgcaggatctccgccggttgttcatccagttcacccggcccacgggcgtgaattttctgctccagcaggccgagcgccattgcaaagccgtacagcgtggcggcaggcgttggcgggcagccagggatataaacatccacagggacaattttatccgtaccgccccacacgcagtagagatcgtggaagatcccgccactgttaccgcaggcaccgtaggagatacaaattttcgggtccggcgcggactgccacgcacgcagcgcaggggatcgcattgcacgggtgaccgcgccggtaaacagtaaaatatccgcatgacgcggactaggaacgactttaatgccgaagcgttctgcatcaaacagcgggctaagcgtggcgaaaatttcgatttcgcaaccgttgcagccgccgcagtccacgcggtaaacataggcagaacgtttgatttttttcagtaagctcgccttcatgctggcgatggattcatccaccgtcatggggaccggaatgccgttggcgtcacgggggcctaataaattgctcatcagatggcctctttcatatggcgagtcagttcaatacggtcggacggcaccaggcatttctggcgcttacattccgggcaagtctcaaagctttcgcggtggttttccgcgcggctgtcgccgttgtgcttaagcagcgcaatggcgtagtcgatctctttctggacggcgaaaggacgattgcagacgcggcagttgcacagcgcgaagcgggactgttgcaggaagtcttctttcttccacaccgccagttcgtactcttggctcagtttgatcgccgccgtcgggcagacttcttcgcagcgtccacagaagatgcagtgcccaagattaaactcccaggcaagctctcctgtggcgaggtcagtttcaaccgttaaggcgttactcgggcaggcattgacgcaggccgcgcagccgatgcactgctgcgggttctgctctggcttaccacggaagtttttatcaaccgcaatcggctccagcggataagagctggtcgccgtgccggttttgatgacttttttgataaaggtaaacatggcgattccttatttcagcgggctgtttttacgctcaatgctgtaacgctcgagttctttgtacggcaccactttgctcttcttcttacgcacatcgaccacggtcatgcggtcggtacaggagtagcaagggtcgaggctaccgataatcagcggcgcatcggaaacggtgttgccgcgcagcatgtagcgcagggtcggccagttcgcgtaggtcgcggcacggcagcgccagcggtacagcttctggttgtcgccggtcatgctccagtggatatcatcgccgcgcggcgcttcggcaaagcccagcgcaaagcggtgcggaatgtaggtaaagccttccaccatcagtgggccacccggcaggttatccagaccgtagtcgatcatgttcagcgcggtatagacttcgttgatacgcactttcagacgggaaataacgtcgcagccctgctcgctgtggacttccattggcagcaggccatagccgacaaacgggtgatcggcgcgggtatcacgggcgtgaccgctggcacggaccatcgggccgacgttactgaagtcgcgagcgatttccgggtccagacgaccaatgccgacagtgcgctgttccatgttcggagtgctcagcagcacatccaccagctcctgcacttcacgacgcatctgttgtgccagctggcgggtctggatcatgtcgtctttcagcagatcgcgacgaatcccgccgatcaagttcaggccgtaggttttacgcgcaccggtaaggatctctgccattttcatggaggtttcacgcacgcggaagaactgcataaagccggagtcgaagccggtaaagtgacaggccaggccaaggttgagcagatggctgtgcaagcgttctacctccagcagaatggcgcggatcatctgcgcacgttctggcacctgaatacccatcgcgttttccacgctcgtggtgtaggcggtgctgtgggcaaagccgcagatcccgcacacacggtcagagaggaaggtcacttcgttataacccatacgggtttccgccagtttttccatgccgcgatggacgtagaacagacggtagtcggcgtcgataatgttttcgccatcgacgaacagacggaagtggcccggttcatcagaagtgacgtgcagcggaccaatcggcacgacgttgtttttcttgtcgcccagttcgttgatgaactcgtaggtttcagcatcggtggtcggtgccggacgctgacgataatccatgctgtctttacgcagcggataaagttcatccggccagtcatccggcagcaccagacgacgttcatccggcagaccaaccggaatcaaaccgtacatatcgcgcacttcacgctcgccccacaccgccgccggaacgcgcggcgtcacggacggatattccggtttgttggcgtcaacttcgacgcgaaccgtaatccaacacttagtgcccttctccatgctcagcacgtagtaaacggcgtaatgaccattcagtttgcgttcgtcgttaccaaacagcacgctcagccagccaccctgtttgtagtaaagaaactccaccacttccggcaggtagttcacctttacggtgacagtcagctgatctttggtctgccaggcgtggtccagcacgacgcccggaaatgcctcattcagcgcggcgagataatgttgacctaatttttcttcagacatgctcaaactctctttaatcacgccgccagcaaggagacgaacgctaaaaatgcaaagccaaacccagcccaggtaatgcgcggagtaatatcaagacgcagacgggccatgctgttttcgaacagcgcgataaccaggacgccgaccaccagttttacgatggcaatcaccagcgccagcagcagtccaccggcggtgaaggtttccatttgtccccacggaataaacaccccgacgaacatctgcaacaccaccagctgtttcaggctgataccccatttcatgacgccaaagccgctgccgctgtattcagagagcgggccttcctgcagctcctgctcggcttccgccaggtcgaacggcagtttgcccatttcgataaaggtggcgaacgcacaggcacaaagcgccagtaccagcgggatgctctggctcagcggccagtgataaacggtgtcggtgatgttgctgatgttggtggaaccggcaacctgtgcggcaacccacagaccaagcagcagcatcggttcgaccagcacgccaagcatcgcttcacggctcgcgccgatagcggtaaacgggctaccggtatccagaccagaaatggcaaagaagaaacgcgcgatggcaaagagatacagtaaggtgatcaaatcacccagttgcggcagcggagaaccgacggtcaccaccggcagcgcagtagcgatagtcagcatgacgcccaccatcacatacggcgtcaggcggaacacccagccggaggcatccgggccgacgctctgacgccccagcagtttgataatgtcgcgatactcctgcaacacgcccggcccgcgacggttatgcaagcgggcgcgcgccacgcgggttataccggagagcagcggcgcaacggcaaataacaccagcgcctgaattaacggatataaaacactcattctcaggctcctcgactaacaataatcaccaccagtaccgccagttcaaccagcgccatccggcggaacagcaacgcactcccctcgcactgccagcccggcaccagagacaccggattcagccatttgcgtagtttcagcaccggcgcaaacgcctgtttcaccggcatggcaaaaccgtgagcggtaatcaccatacttttttcgtggtcgtaaccgcacacccaggccgcaccgcgggaacggcttggcaaacgatcgcctttgcaaatcgccataatgatgaatggcagcagcgggcaggcaatcagcagcaacgtgatcatcggttgagaaacggtggtgttagcaggctccagcggcagaggtacagcagcagagagcatcggcagtagccacggcgcagcaacaccgccaattacgcagcaaatcgccagtgccactacgcttacgctcatcaggagcggcgcacaggtggcgttttcggcttctttggtgcgcggcgcgccgaggaacgtgacgccatagactttcgccatacacatcaccgccagcgcaccggtaattgccagccccacagcgagcagcggccccagcagacgggcaacaaacgcgccactattgctcagtttgaaaaaactttgatagataacccattccccggcaaaaccattcagcggcggcagcgcagccattgccatcagcccgactaacatggcgatggagataaccggcattttcttgccaataccaccgagtttttcgatatcgcgatgaccggtacggaaccagacgctccccgccccgaggaacagtacgcttttgaacaggctatggttaagcagatggtacagaccaccgaccaggccaagagcaatcagcgccggttgttcgagcgcgatacccgttacgccagcgcccagccccagcaggatgatgccgatattttccagggtgtggtaagccagcaggcgctggatgttgtgctccaccagcgcatacagaccaccgacaaacgcggtgatcatgccgagcaccagcagcgcgatcccccaccacagcggtgcattaccgcccagcagactcagggttaaaatgcccagcaggccaattttcatgactaccgtagaaaacaacgcggcagctggcgcagaggcgttcgcatgtgcctgcggcacccagccgtgcagcggaataatcccggccagcaggccaaagccaatcactccgagcagccagatatcggaaccgagcggcagctgttgcatacgcatatccagcaggcgcagatccagcgtgccgtaacgctgccacagcagccagcaagcaatcgccagcagcagagtgccaagacgccccagcgcaaaccacagtttgccctctttgctgttgctggtgaggaacaccgcgcacagggccatgatttcggccattaccacgaacatgccgaggttgctggcaatgacggcgcagacggcggcagccatcaacatattgatctgcaagccgttgcacttcacctgcgcgtggcgatgccagtcaatgttgtagaggctgacaaacagaccgcacagaccgagcgtaatcagccaaatcgcgttaagcggagagatttgcacatcgtagcttaccaggctcagcgcaccgctcacgccaaccgcgccagtcagtacagtgaagcccgcggctgccgtatacagactaccaaccgcgccgccaattccagctatccagccacttaacgctttttgaaaagaaaagagaaatgccagaacagcggcggcgacaaaccacgccacgccgctattgatcagggaaattgcgctcatttagcctctccactttgagcctgctgaaacaaggtgagatcgccaaagtccgtgttaaaggtcagctcacgcttacgtttgctgacgcgggcgatatcggtgttatccaccagatgcagggctttagtcgggcacatccgcacgcaggccggaccttgttcatcaaagctacaaaggtcacatttgacggcgatcgcgcgaatacctggcacccagtcaagcaatgtgctgacacgcgccggagcaggcggtgccggtggcgctttcggggtattggcgtttgccggaatatccagcggacggctgccggaaaattcaattgcgccaaacgggcaggcgatgccgcacagcttgcagcttacgcacaggctttcattcaactgcacggccccatcgacgcgggtgatggcgttaaccgggcagaccaccgcgcagggtgcatcttcacagtggtgacagagctgcggcgcagattctttttcattcagcatcactctcaggcgcggcatactttgcaggccgtgctggcgatgcgtctcactacaggcggcctcacaagtgtggcagccgatacagagcgtggagtcagcaattacaaaacgattcaccaggcattcctcaggtgattgtcatttttgacgaaaacatgccgatgaaatgtcattttcgacactcatcgacacgcccatccccaaacaggcgtaacgcctgcaaaacgggcaaagcctcagctcatgctgccgggctttgtccctttaccagttggcttaaattcaccggcacattgttttcaatagcggtgtataagctgtcgtaaacgccagcgattttttcgagatagtgttccagaacctgttcgcgatcgcggatgttgaccttgccatcaatcatgccgtcaatgctcagttgcgcctgcgcaatccgctgtttgtcttcgccatcttttgtttcgacgtaatactcgatggtgtggctgttaaagccatccgccagggtgacgtaaatgcgaaaatgttcaaaaaggacgaaacagagttctttgtccggcgcgcagctcatggcgtgatgcaggcgcgctttgcttaacgtgatcccctgaaccaggctattgcagtagatgtgccactggtcctgtaggcgacgatgccgctgtgcgatgtaatcggctttctcgcttatttcccaaatagtcattgtcaggttacccgtttaacagagatgccagctttaagcattttttgtgccaacttttaatttattgttattaaagagatttttaagctaaagatgaatttcgtcgccgtgtcgacgtgtcatttcgacatcatcgacattattcaccgcagggataatcaacactggcacaattattgcttgtagctggcaatagttaatgggaggcgatatgcacgaaataaccctctgccaacgggcactggaattgatcgaacagcaggccgcaaaacacggcgcaaaacgcgtaactggggtctggctcaaaattggcgcattttcttgtgtcgaaaccagctctcttgccttttgttttgatctggtttgccgcggcagcgtggcggaaggttgtaaactgcacctcgaagaacaagaggccgaatgctggtgtgaaacatgccaacagtatgtgacgctactgacccagcgcgtccgccgctgtccacagtgtcatggtgacatgctgcagattgtggcagacgacggtttacagattcggcggatagaaatagaccaggagtgagcgatgtgtacaacatgcggttgcggtgaaggcaacctgtatatcgagggtgatgaacataaccctcattccgcgtttcgtagcgcgccatttgccccggcggcacgcccgaagatgaaaatcaccggcattaaagcgcctgaatttacccccagccagactgaagaaggcgacctgcattacggtcatggcgaagcgggcactcacgcaccgggcatgagccagcgtcggatgctggaagtcgaaattgacgtgctggacaaaaataaccgtctggctgaacgcaaccgcgcgcgctttgctgcccgcaagcaactggtgctcaacctggtttccagccctggttccggtaaaaccaccctgctgacggaaaccctaatgcgcctgaaagacagcgttccgtgcgcagttattgaaggcgaccagcaaaccgtgaacgatgccgcacgcattcgcgctaccggcacaccagcgattcaggtgaacaccggtaaaggctgccatcttgacgcacagatgattgccgacgccgcaccgcgtctgccactggacgataacggtattctgtttatcgaaaacgttggcaacctcgtatgcccggccagcttcgatctcggtgaaaaacacaaagtggcggtgctttccgttaccgaaggtgaagacaaaccactgaaatatccgcatatgtttgccgccgccagcctgatgctgctcaacaaagttgacctgttgccgtatctcaactttgacgttgaaaagtgcatcgcctgcgcccgcgaagtcaatccagaaattgaaatcatccttatttccgccaccagcggcgaagggatggaccagtggctgaactggctggagacacagcgatgtgcataaggtaaaactggctggagacacagcgatgtgcataggcgttcccggccagatccgcaccattgacggcaaccaggcgaaagtcgacgtctgcggcattcagcgcgatgtcgatttaacgttagtcggcagctgcgatgaaaacggtcagccgcgcgtgggccagtgggtactggtacacgttggctttgccatgagcgtaattaatgaagccgaagcacgcgacactctcgacgccttacaaaacatgtttgacgttgagccggatgtcggcgcgctgttgtatggcgaggaaaaataatgcgttttgttgatgaatatcgcgcgccggaacaggtgatgcagttaattgagcatctgcgcgaacgtgctagtcatctctcttacaccgccgaacgccctctgcggattatggaagtgtgtggcggtcatacccacgctatctttaaattcggcctcgaccagttactgccggaaaacgttgagtttatccacggtccggggtgcccggtgtgcgtactgccgatgggtagaatcgacacctgcgtggagattgccagccatccggaagtcatcttctgtacctttggcgacgccatgcgcgtgccggggaaacagggaagcctgttgcaggcaaaagcacgcggtgccgatgtgcgcatcgtttacagcccgatggatgcgttgaaactggcgcaggagaatccaacccgcaaagtggtgttcttcggcttaggttttgaaaccactatgccgaccaccgctatcactctgcaacaggcgaaagcgcgtgatgtgcagaatttttacttcttctgccagcacattacgcttatcccgacgttgcgcagtttgctggaacagccggataacggtatcgatgcgttcctcgcgccgggtcacgtcagtatggttatcggcaccgacgcctataattttatcgccagcgattttcatcgtccgctggtggttgctggattcgaaccccttgatctactacaaggcgtggtcatgctggtgcagcagaaaatagcggcccacagcaaggtagagaatcagtatcgtcgagtggtaccggatgccggtaacctgctggcgcaacaggcgattgccgatgtgttctgtgtcaacggcgacagcgaatggcgcggcttaggcgtgattgaatcttctggcgtgcacctgacgccggattatcaacgattcgatgccgaagcacatttccgcccggcaccgcagcaggtctgcgatgacccgcgcgcgcgttgtggtgaggtattaacgggcaaatgtaagccgcatcaatgcccgctgtttggtaacacctgtaatcctcaaaccgcgtttggtgcgctgatggtttcctccgaaggagcgtgcgccgcgtggtatcagtatcgtcagcaggagagtgaagcgtgaataatatccaactcgcccacggtagcggcggccaggcgatgcagcaattaatcaacagcctgtttatggaagcctttgccaacccgtggctggcagagcaggaagatcaggcacgtcttgatctggcgcagctggtagcggaaggcgaccgtctggcgttctccaccgacagttacgttattgacccgctgttcttccctggcggtaatatcggcaagctggcgatttgcggcacagccaatgacgttgcggtcagtggcgctattccgcgctatctctcctgtggctttatcctcgaagaaggattgccgatggagacactgaaagccgtagtgaccagcatggcagaaaccgcccgcgcggcaggcattgccatcgttactggcgatactaaagtggtgcagcgcggcgcggtagataaactgtttatcaacaccgctggcatgggcgcaattccggcgaatattcactggggcgcacagacgctaaccgcaggcgatgtattgctggtgagcggtacactcggcgaccacggggcgactatccttaacctgcgtgagcagctggggctggatggcgaactggtcagcgactgcgcggtgctgacgccgcttattcagacgctgcgtgacattcccggcgtgaaagcgctgcgtgatgccacccgtggtggtgtaaacgcggtggttcatgagttcgcggcagcctgcggttgtggtattgaacttagtgaagcggcactgcctgttaaacctgccgtgcgtggcgtttgcgaattgctgggactggacgccctgaactttgccaacgaaggcaaactagtaatagctgttgaacgcaacgcggcagagcaagtgctggcagcgttacattcccatccactggggaaagacgcggcgctgattggtgaagtggtggaacgtaaaggtgttcgtcttgccggtctgtatggcgtgaaacgaaccctcgatttaccacacgccgaaccgcttccgcgtatatgctaataaaattctaaatctcctatagttagtcaatgaccttttgcaccgctttgcggtgctttcctggaagaacaaaatgagttatacaccgatgagtgatctcggacaacaagggttgttcgacatcactcggacactattgcagcagcccgatctggccagcctgtgtgaggctcttagccaactggtaaagcgttctgcgctcgccgacaacgcggctattgtgttgtggcaagcgcagactcaacgtgcgtcttattacgcgagccgtgaaaaagacacccccattaaatatgaagacgaaactgttctggcacacggtccggtacgcagcattttgagccgccctgatacgctgcattgcagttacgaagaattttgtgaaacctggccgcagctggacgcaggtgggctatacccaaaatttggtcactattgcctgatgccactggcggcggaagggcatatttttggtggctgtgaatttattcgttatgacgatcgcccctggagcgaaaaagagttcaatcgtctgcaaacatttacgcagatcgtttctgtcgtcaccgaacaaatccagagccgcgtcgttaacaatgtcgactatgagttgttatgccgggaacgcgataacttccgcatcctggtcgccatcaccaacgcggtgctttcccgcctggatatggacgaactggtcagcgaagtcgccaaagaaatccattactatttcgacattgacgatatcagtatcgtcttacgcagccaccgtaaaaacaaactcaacatctactccactcactatcttgataaacagcatcccgcccacgaacagagcgaagtcgatgaagccggaaccctcaccgaacgcgtgttcaaaagtaaagagatgctgctgatcaatctccacgagcgggacgatttagccccctatgaacgcatgttgttcgacacctggggcaaccagattcaaaccttgtgcctgttaccgctgatgtctggcgacaccatgctgggcgtgctgaaactggcgcaatgcgaagagaaagtgtttaccactaccaatctgaatttactgcgccagattgccgaacgtgtggcaatcgctgtcgataacgccctcgcctatcaggaaatccatcgtctgaaagaacggctggttgatgaaaacctcgccctgaccgagcagctcaacaatgttgatagtgaatttggcgagattattggccgcagcgaagccatgtacagcgtgcttaaacaagttgaaatggtggcgcaaagtgacagtaccgtgctgatcctcggtgaaactggcacgggtaaagagctgattgcccgtgcgatccataatctcagtgggcgtaataatcgccgcatggtcaaaatgaactgcgcggcgatgcctgccggattgctggaaagcgatctgtttggtcatgagcgtggggcttttaccggtgccagcgcccagcgtatcggtcgttttgaactggcggataaaagctccctgttcctcgacgaagtgggcgatatgccactggagttacagccgaagttgctgcgtgtattgcaggaacaggagtttgaacgtctcggcagcaacaaaatcattcagacggacgtgcgtctaatcgccgcgactaaccgcgatctgaaaaaaatggtcgccgaccgtgagttccgtagcgatctctattaccgcctgaacgtattcccgattcacctgccgccactacgcgagcgtccggaagatattccgctgctggcgaaagcctttaccttcaaaattgcccgtcgtctggggcgcaatatcgacagcattcctgccgagacgctgcgcaccttgagcaacatggagtggccgggtaacgtacgcgaactggaaaacgtcattgagcgcgcggtattgctaacacgcggtaacgtgctgcagctgagtttgccagatattgttttaccggaacctgaaacgccgcctgccgcaacggttgtcgccctggagggcgaagatgaatatcagttgattgtgcgcgtgctgaaagaaaccaacggcgtggttgccgggcctaaaggcgctgcgcaacgtctggggctgaaacgcacgaccctgctgagtcggatgaagcggctgggaattgataaaagcgcattgatttaactgcaaattgccggacagatctgcctgtccggcatattattcatgaggttttttcggacgatatttttccggcagttctggcaccggacgcttgtcatcgatgagatgacgcacggttaagatcggatgacgccacagcattctcggcccggcccaacgcataatctgtttcatctcttcacgctttgcaggctggtaacagtgcaccggacactgcttacaggctggtttctcttcgccgaacacacatttatccagccgcttttgcgcgtaaacaaacaacgcctcgtaatgctccggctccgcactcgcctgcgggcatttcgcttgataaagatcgatcatttttttaatcgtcagtttttcacgagagatacgcttgccggacatgctgcctccacctcattaagatgtatttatattacatcttaatcttaaagggcactatgactccaaagaagaagggttagccaaccgatacaattttgcgtacttgcttcataagcatcacgcaaaagctgcaaaacagcatctttcccggaaccagcatcaagaactcgccgttcgcttcttcccctgaaatgattaactccggtatcatgtgcgccttatgtgattacaacgaaaataaaaaccatcacaccccatttaatatcagggaaccggacataaccccatgagtgcaatagaaaatttcgacgcccatacgcccatgatgcagcagtatctcaggctgaaagcccagcatcccgagatcctgctgttttaccggatgggtgatttttatgaactgttttatgacgacgcaaaacgcgcgagccaactgctggatattagtctgaccaaacgcggtgctagcgcgggagagccgatcccgatggcggggattccctaccatgcggtggaaaactatctcgccaaactggtgaatcagggagagtccgttgccatctgcgaacaaattggcgatccggcgaccagcaaaggtccggttgagcgcaaagttgtgcgtatcgttacgccaggcaccatcagcgatgaagccctgttgcaggagcgtcaggacaacctgctggcggctatctggcaggacagcaaaggtttcggctacgcgacgctggatatcagttccgggcgttttcgcctgagcgaaccggctgaccgcgaaacgatggcggcagaactgcaacgcactaatcctgcggaactgctgtatgcagaagattttgctgaaatgagcttaattgaaggccgtcgcggcctgcgccgtcgcccgctgtgggagtttgaaatcgacaccgcgcgccagcagttgaatctgcaatttgggacccgcgatctggtcggttttggcgtcgagaacgcgccgcgcggactttgtgctgccggttgtctgttgcagtatgcgaaagatacccaacgtacgactctgccgcatattcgttccatcaccatggaacgtgagcaggacagcatcattatggatgccgcgacgcgtcgtaatctggaaatcacccagaacctggcgggtggtgcggaaaatacgctggcttctgtgctcgactgcaccgtcacgccgatgggcagccgtatgctgaaacgctggctgcatatgccagtgcgcgatacccgcgtgttgcttgagcgccagcaaactattggcgcattgcaggatttcaccgccgggctacagccggtactgcgtcaggtcggcgacctggaacgtattctggcacgtctggctttacgaactgctcgcccacgcgatctggcccgtatgcgccacgctttccagcaactgccggagctgcgtgcgcagttagaaactgtcgatagtgcaccggtacaggcgctacgtgagaagatgggcgagtttgccgagctgcgcgatctgctggagcgagcaatcatcgacacaccgccggtgctggtacgcgacggtggtgttatcgcaagcggctataacgaagagctggatgagtggcgcgcgctggctgacggcgcgaccgattatctggagcgtctggaagtccgcgagcgtgaacgtaccggcctggacacgctgaaagttggctttaatgcggtgcacggctactacattcaaatcagccgtgggcaaagccatctggcacccatcaactacatgcgtcgccagacgctgaaaaacgccgagcgctacatcattccagagctaaaagagtacgaagataaagttctcaccagtaaaggcaaagcactggcactggaaaaacagctttatgaagagctgttcgacctgctgttgccgcatctggaagcgttgcaacagagcgcgagcgcgctggcggaactcgacgtgctggttaacctggcggaacgggcctataccctgaactacacctgcccgaccttcattgataaaccgggcattcgcattaccgaaggtcgccatccggtagttgaacaagtactgaatgagccatttatcgccaacccgctgaatctgagcccgcagcgccgcatgttgatcatcaccggtccgaacatgggcggtaaaagtacctatatgcgccagaccgcactgattgcgctgatggcctacatcggcagctatgtaccggcacaaaaagtcgagattggacctatcgatcgcatctttacccgcgtaggcgcggcagatgacctggcgtccgggcgcagtacctttatggtggagatgactgaaaccgccaatattttacataacgccaccgaatacagtctggtgttaatggatgagatcgggcgtggaacgtccacctacgatggtctgagcctggcgtgggcgtgcgaggaaaatctggcgaataagattaaggcattgacgttatttgctacccactatttcgagctgacccagttaccggagaaaatggaaggcgtcgctaacgtgcatctcgatgcactggagcacggcgacaccattgcctttatgcacagcgtgcaggatggcgcggcgagcaaaagctacggcctggcggttgcagctctggcaggcgtgccaaaagaggttattaagcgcgcacggcaaaagctgcgtgagctggaaagcattagcccgaacgccgccgctacgcaagtggatggtacgcaaatgtctttgctgagtgtaccagaagaaactagccctgcggtcgaagctctggaaaatcttgatccggatagtctcaccccgcgtcaggcgctggagtggatttatcgcttgaagagcctggtgtaataacaattcccgatagtcttttgctatcgggaatattaacgacaactgacgaataaaataaaaacaccctgtataataggaaagcttattttacagggtaaaaccatgccatctacacgctatcaaaaaatcaatgcccatcactatcgccatatatgggtcgttggtgatattcatggtgaatatcagttattacaatcccgcttacatcaactctcttttttccccaaaatcgacttacttatttctgtcggcgataatattgatcgtggaccggagagtcttgacgtcctgcgcctgctaaaccaaccctggtttacgagcgttaaaggcaaccacgaagcgatggcgcttgaggcattcgaaactggcgatggcaatatgtggcttgccagcggtggtgactggtttttcgatttaaatgatagtgagcaacaagaggcaatagatctgttgctgaaattccatcaccttccacatattattgaaatcactaacgacaacataaaatatgccatcgcacatgcagattatccggggagtgaatatctctttggtaaagaaatagcggagagcgaattactctggcctgttgatcgtgtgcagaaaagccttaatggcgagttacaacaaataaacggcgctgattattttatatttggacatatgatgtttgataacattcagacgttcgctaaccagatttatattgataccggaagcccgaacagcgggcggctgagtttttataaaataaagtaatctcatgcttcttctgtgaagcatgagtaacccggtgttattgcaggccattattcatttttcgctaccagcaaagagagatcctgcttcaccagcgcgcgactggcactctccggcaaaccgtcgtctgtaataatctgatcaaactcgcttaatggtaacgccagccatgtcgccacctgaccatatttcgtcgcatcacagaccaaaactcgctggcggctggcactggcaatcgcccgtttcaccgtgactttatcttccgctggcgtagaaatcccccgcacactccaactgcttgcagaaataaaagcctgatcaatcatcaggctgcgcagcatggtcgcagcggcttccccgacacaggaacggttttcccgacacactgcaccgccagtgtgaataattgtgcaattactgttgtcgagcaagtagtccgcaataacgaaatcgtttgtgaccacagtcagactctccatgtgaatcagatgctgtgctatcgctaacgtggtcgttcccgcatccagatagatacaacttcccggctgaacaagacttgccgccagcttgccaatagccgctttttgcgtcattgccagcgcagtttttacctgatgagaaggttcatgcgccacgcgtcccggagactggacgcctccggacaccagcacaacggctccctgctgctccagtttttgtaaatcccgacgaatggtcatatgactcacattcattctgtccgttagttcagcaatactgacaatgcctttttcagctaccatctcaaggatgatttggcgacgctctacgggtatcaacttttgctccttcctttgtcctgcactcattctacgctatttgcctgcgaaacgtgcgcggcgcaactaacgcttagttcacataaaataacacacaatgttaatttatgtgaatcagatcaccataccgttatcttccagcgcttatattcacaatatcaaacaaaatatcacttaaattaacaaggagagcagatgaaaacgggatctgagtttcatgtcggtatcgttggcttagggagtatgggaatgggagcagcactgagttatgtccgcgcaggtctttctacctggggcgcagacctgaacagcaatgcctgcgctacgttgaaagaggcaggtgcttgcggggtttctgataacgccgcgacgtttgccgaaaaactggacgcactgctggtgctggtggtcaatgcggcccaggttaaacaggtgctgtttggtgaaacaggcgttgcacaacatctgaaacccggtacggcagtaatggtttcttccactatcgctagtgctgatgcgcaagaaattgctaccgctctggctggattcgatctggaaatgctggatgcgccagtttctggtggtgcagtaaaagccgctaacggtgaaatgactgtcatggcctccggtagcgatattgcctttgaacgactggcacccgtgctggaagccgttgccggaaaagtttatcgcataggtgcagaaccgggactaggtagcaccgtaaaaattattcaccagttgttagcgggcgtacatattgctgccggagccgaagcgatggcacttgcagcccgtgcggggatcccgctggatgtgatgtatgacgtcgtgaccaatgccgccggaaattcctggatgttcgaaaaccggatgcgtcatgtggtggatggcgattacaccccgcatagtgccgtcgatatttttgttaaggatcttggtctggttgccgatacagccaaagccctgcacttcccgctgccattggccagtacagcattgaatatgttcaccagcgccagtaacgcgggttacgggaaagaagacgatagcgcagttatcaagattttctctggcatcactctaccgggagcgaaaagttgagctaaactctaccgggagcgaaatcatgatcaagattggcgttatcgccgatgattttaccggcgcgacggatatcgccagttttctggtggaaaacggtctaccaacggtacaaattaacggtgttccaacaggtaaaatgccggaagcaatcgacgcactggtgatcagcctgaaaacgcgctcctgtccagtggttgaagccacacagcaaagcctggcggctctgagctggttgcaacagcaaggttgcaaacagatctatttcaaatactgctctactttcgacagtacggcgaaaggtaatattggcccggttaccgatgccttaatggatgctctcgacacgccgtttacggtcttctctccggccctgccggtcaacggacgtacggtttatcaggggtatttgttcgtaatgaatcaactgctggccgaatccgggatgcgccatcacccggtaaatcccatgaccgacagctatcttccccgtctggttgaagcgcaatccacagggcgctgcggcgtcgttagcgcacatgttttcgaacaaggtgtggatgccgttcgtcaagagctggctcgcttacagcaagagggctaccgctacgcggtgcttgatgcgctgaccgaacaccatctggaaattcagggagaagccttgcgcgatgccccactggtaacgggcggttctggtctggcgattggcctggcccggcagtgggcgcaagaaaacggtaaccaggctcgcaaagcagggcgtccgctcgctgggcgcggcgtagtgctctccggtagttgctctcaaatgaccaaccgccaggtagcacattaccgtcaaattgcaccagcccgtgaagttgatgtggcacgctgcctcagtattgaaactctggccgcttatgcacacgaactggcagagtgggttctgggccaggaaagtgtacttgctccactggtttttgccaccgccagcactgacgcattggcagcaattcaacagcaatacggtgcacaaaaagccagtcaggcagtagaaacactgttttctcaactagcggcgcggttagcagcggaaggcgtgacacgctttattgtcgcaggcggtgagacctccggcgtagtcacacagagcctgggaataaaagggtttcatattggcccaaccatttccccggcgtgccgtgggtaaacgcactggataagcctgtctcactcgcccttaaatctggcaacttcggtgatgacgcctttttttcacgagcccaaagagagtttttatcatgagcgatttcgcaaaagtagagcagtctttgcgagaggagatgacgcggattgccagtagtttctttcagcgcggctatgcaaccggtagcgctggcaatctgagcctgcttttacctgacgggaatttactggcgacaccgacaggtagttgcctgggcaatctcgatccgcagcggctttccaaagtcgccgcggatggcgaatggttaagtggtgacaaacccagcaaagaggtgctctttcatctggcgctgtatcgcaacaatccgcgctgtaaagcggtggtgcatttgcacagcacatggagcacggcgctttcctgcctgcaagggctggacagcagcaacgttattcgtccgttcacaccatacgtggtgatgcggatgggaaatgtcccgctggtgccttattaccgaccgggcgataaacgcatcgcacaggatctggcggaactggcagcagacaatcaggcttttttactggcaaatcatggcccagtggtttgcggtgaaagcctgcaagaagccgccaacaatatggaagagctggaggaaacggcaaagctgatttttattctcggtgaccgcccgatccgttatctgaccgcaggtgaaattgcggaattaaggagttaatgcaatgcctcgttttgcagctaatttatccatgatgttcaccgaagtgccttttattgaacgcttcgccgcagcgcgaaaagccgggttcgatgctgtggaatttctgtttccctataactactccaccctgcaaatccaaaagcaactggagcaaaaccatctgacactggcgctgttcaataccgctcccggagatattaatgcgggggaatggggattatccgcccttcccggacgtgagcacgaagcacacgcagacatcgacctggcactggaatatgcattggcgctcaattgtgaacaagtccatgtgatggcaggcgtcgtgcccgctggcgaagatgctgaacggtaccgggcagtatttatcgataatatccgctacgctgccgaccgctttgcgccacacggcaagcgaatattagttgaagcactcagccccggcgttaagcctcattatctcttctccagccagtatcaggcactggctattgttgaagaggttgcgcgagataacgtgtttattcaactagatacttttcatgcgcaaaaagtagatggcaacctgacgcatttaatccgcgactacgccgggaaatatgcgcacgtacaaattgccggactacctgatcgacatgaaccggacgatggagaaatcaactatccgtggctgttccgcctgttcgatgaggtgggatatcagggctggatcggttgtgaatataaacctcgtggcctcaccgaagaagggcttggctggtttgacgcctggcgctaattcgttaaatccctaattacaacgtacccatacatccccccatctacggatggggtaggttaactataactttcagacagggtttcccatgtccacaattacattgttatgcattgcgttagctggcgtaatcatgctgttgctgctggtcatcaaggcaaaggtacaaccattcgttgctttgctcctcgtcagcctgttagtcgcacttgcggcaggtataccggcgggcgaagtgggtaaagtgatgatcgccgggatgggcggtgtgcttggttccgtcactattattattggtctgggcgctatgctggggcgtatgatcgaacactctggtggtgcagagagtctggctaattatttcagtcgcaagttaggtgacaaacgaactatcgctgcgctgactctggcagcgttcttcctcggtattcccgtcttctttgatgtcggctttattattcttgcgccaatcatttacggttttgccaaggttgccaaaataagcccactcaaatttggcctgcctgtcgctgggatcatgctcactgttcacgtggcggtaccgccgcatccaggccctgtcgccgcagcggggttactccacgcagacatcggctggctaaccatcatcggtattgcgatttctattcccgtaggggttgttggctactttgcagcgaaaataatcaataagcgccaatatgcgatgagtgtagaagtactggaacagatgcaactggctccggccagtgaggaaggcgcgacaaaattaagcgataaaataaatccaccgggcgtcgcgctggtcaccagcctaattgttattcctatcgcgattatcatggcgggtacggtttccgcaacactgatgccgcctagccatcccctgcttggtacgctacagctgatcggcagtccaatggtagctctaatgattgcgctggtgctggcattctggttattggctttacgtcgcggctggagcttacaacacaccagcgacattatgggcagtgcgcttcctactgcggcggtagtgattttggttactggtgctggaggggtatttggcaaagtgctggtggaaagcggcgtcggcaaagcccttgccaacatgctacaaatgattgacctgcctctgttaccagccgcatttattattagtctggcgctgcgtgcaagccaggggagtgcaaccgtagcaatactgacaaccggcgggttactcagtgaagcggtgatgggattgaatccgattcagtgcgtattggtgacgctggcagcctgctttggtgggcttggtgcgagtcatattaatgacagtgggttctggattgtgaccaaatatctggggttgagcgtagcagacggtctgaaaacctggacagtgttaacgaccattctcggttttaccggactcttaattacctggtgcgtatgggcggtaatttgaccttaataaaaaggtccgatgggcatcggaccttttattgtgcacagaaaaggccagcctcgcttgagactggcctttctgacagatgcttacttactcgcggaacagcgcttcgatattcagcccctgcgtttgcaggatttcgcgcaaacggcgcaggccttcaacctgaatctggcgaacacgttcacgggtgaggccaatttcacgacctacatcttccagtgttgccgcttcgtaccccagcaaaccgaatcgacgtgccagcacttcacgctgtttggcgttcagctcgaacagccatttgacgatgctctgcttcatatcgtcatcttgcgtggtatcttccggaccgttctctttttcatcggccaggatgtccagcaacgctttttcggaatcaccacccagcggggtgtctacgctggtaatgcgctcgttaagacgaagcatacggctgacgtcatcaactggcttatccagttgctctgcgatctcttccgcacttgattcatggtccagcttatgggacaactcacgtgcggttcgcaggtaaacgttcagctcctttacgatgtgaatcggcaaacgaatagtacgggtttggttcataatcgcccgttcaatcgtctggcgaatccaccaggttgcgtatgtactgaagcggaaaccacgttccgggtcaaacttctctaccgcgcggatcagccccaggttgccctcttcgataaggtccagcaacgccagaccacgattgccataacggcgggcaatttttaccaccagacgcaagttactctcgatcatccggcggcgagaggcgacatctccacgcagtgcgcgacgcgcaaaataaacttcttcttcggccgttaacagtggactataaccaatctcaccaaggtaaagctgagtcgcgtccaacacacgctgtgtggctccctggcttaacagttcctcttcggccaaatcgttatcactgggttcctgttctactaaggccttttcgtcaaaaacctcaactccgttctcatcaaattccgcatcttcatttaaatcatgaactttcagcgtattctgactcataaggtggctcctacccgtgatcccttgacggaacattcaagcaaaagcctggttccgccgatttatcgctgcggcaaataacgcagcgggtttacggatttccccttgtaacgaatttcaaaatgcaagcgtgtactactggttccggtgctacccatggtcgctattttttgccccgccttaacttcttgttgttcccggaccagcattgtgtcgttatgggcgtaggcactcaggtaatcatcattatgtttgatgataatcagattaccgtagccgcgcagcgcgttaccagcataaacaacgcggccatctgcggtcgcgataattgcctgtcctttgctgcctgcgatatcaatccccttgttgcccccctcagaagcgccaaaggtttcgatcactttgccctcagtcggccagcgccaggtggagataggcgtactggtacttgtactgctgacagtcggctcggttgtgcttgctgttggtaccgttacaggcgctgtgaccgtggtcgcagttggcttgttgttcggcaacattttgttagcactctgttcaccgctagactcagaatacgtaattgtcggttggctcgcaacagcaacggtggaattttgtgcaggcttgatcacaactccttgctctgctgcgtcggcctgggtaatggcatttccgccagtgattggcgtaccggaagcattacccacctgcaaggtctgaccaacgttcagcgcgtatggtgcctgaatattgttgcgctgagcaaggtcacggaaatcgttgccagtaatccaggcgatatagaaaagtgtgtcgccttttttcacggtataggtactgccgctataactgcctttcggaatgttcccatactgacggttatagacgatgcgtccgttttccatctgtaccggctgctgagctactggctgcactggctggatttgcggttgttgagtagcctgaatttgtggctgctgcaccggctgaatttgcggttgctgcgctgtagacgtcgtccccattttcggcggcggcgtaatcaacataccagaattagtatttgcaggcgcattgccattaacggagctgaccggtgccggtggattactagtgtcagaacagcctgccagccataggctaaccagactcaaagccgcaatgcggcgaacggtgaattttgggcttcccgcgctcatttatcccccaggaaaaattggttaataaccagtgacataattaccgtgcaaggcaccctactgaacactggaaaagatgttcacgatacgctgacctgcggcaaaataaccaggaaaaatccaggtatttcctcacgttttaagccagctcacccttcactaaagggacaaagcgcacggcctccacggtatcgataataaattcgcctccccgacgacgcacccgtttcaaatactggtgctcctcccctacgggtaagacgagaatcccgccttcgtccagctgcgtcattagcgcagttggaatttccggcggtgccgccgtaacaatgatagcgtcaaacggcgcacgtgcctgccaaccttgccatccatcgccatgacgggtactaacattatgtaaatcaagatttttcaggcggcgacgtgcctgccactgcaagcctttaatccgttcaacgctgcaaacatgctggacaagatgcgccaggattgccgtttgatatccgctaccggtgccaatttccagcacccggctctgcggcgtcagctcgagtaattcggtcattcgcgccaccatatatggctggctaattgtctgcccctgacctatcggcaaagcgatattgtcccaggctttttgttcaaacgcttcatcaacgaatttttcacgcggcacggcggcaagtgcattcagcacctgctcatcctgaataccttgcgcacgtaattgatccagaagtgcttgtacgcgtctgcttaccattgcgtgccaactcccacgctgtttaaccagtcactaaccacatcttgcgcgctatgcgcagttaaatccacatgcagcggcgtgatggagacatagccctcatctaccgcagcaaaatcggtccccggaccagcatcacatttaccgcccggcgggccaatccagtacagcgtattgccgcgcggatcttgctgcgggatcacctgatctgccggatgtcgtgtaccgcagcgcgtcacgcgaatacctttgatttgatccaagggtaaatccggaacgttaatattaagaatacgcccggtgcgcagcggctctttacacagtgcgcgcaaaatactacaggttaccgccgcggcagtgtcgtaatgtttatgcccgtcaaggctgacggcaagcgccggaaaacctaaatgacggccttccatcgcggcggctaccgtaccggaataaataacatcatcccccagattcggcccggcgttaattccggacacaacaatgtccgggcgcggacgcatcagagcattcacgccaagatagacgcaatcggtcggggttcccatttgcacagcaatatcaccattttcaaaggtaaacgtgcgcagggaggattccagtgtcagagaattactagcgccgctgcggttacgatcgggggcgaccacctgaacgtcagcaaactcacgcaaggctttcgccagcgtttgtataccgggtgcatgtaccccgtcatcattactcagcaatatgcgcataatcacctgttgtgttgataagttccctgacaacgctggttgcaaaactacccgccggaagccagaaacggatctctacggtgacgtcatcccaccaattccagcttaattgttgcggatacagcagcatcgctctgcgcgcggcttcaactttttcgcgcaccagtaaagcttgtaattcagtttctgcggcgacagctgcttgttcgaatgccagcgcttcacgctgagttccccattcgccactgcctggcaatgcggcggttatcatcaactctttatcgttgacgcgacgctgtaattccgccagttcttcggtggttgcgacaaaccagctaccacgtccggctaattgtagcgcatcgccgtcaacaacttgattaacgtctgcttttttgaggcgctcagcaacaatctgattaaacaacgcactgcgggctgcgctcaaccaaaaactccgtttattgcgatcgcgcaccggagtattggtttgcgcccagcgctgcgccccctgcaagttgctaccgccaatcccaaaacgttgggcaccgaagtagttcggtacaccttttacgcaaatatcgatcagacgttgttcaacgtcatcgcgattgctcacttcgcgcagaaccagggtaaaggcgttacctttcagcgcgcctaaacgcagcttgcgcttgtgccgcgcatactccagcacctggcagccttccagttgaaaggcgctcagatcgggcatttccttgcccggcacgcgagcgcataaccactgttccgtaacagcatgtttgtctttttgcccagcgaagctgacttcacgggcatgaattttcaggaatttcgccagtgcatccgccacaaaacgggtattgcagccgtttttgaggattctaaccagaatatgctcaccttcaccatcaggctcaaagcccaaatcttccaccaccacaaagtcttccggattggctttcagcagcccggtgccttgcggtttaccgtggaggtaagtgagattatcaaactcaatcattttgttgccttaatgagtagcgccaccgcttcacaggcaatcccttccccacgtccggtaaatcccagtttttccgtagtagtggctttcacgttaacatcatccatatggcagccgagatcttcggcaataaacacgcgcatttgtggaatgtgcggcaacatcttcggtgcctgagcgatgatagtgacatcgacgttgccaagggtataacccttcgcctgaatacgacgccaggcttcgcgtagcagctcgcggctatcggcacctttaaatgccggatcggtatccgggaacagcttgccgatatcccccagcgccgccgcgccaagcaatgcatcggtcaacgcatggagcgccacgtcgccatcagaatgcgccagcaatcctttttcgtaaggaatgcgtacgccaccaatgataattgggccttcaccgccaaaggcatgtacgtcaaaaccgtgtccaattcgcattatgtattctcctgatggatggttcgggtgaggtaaaactcggccagtgccaaatcttccgggcgcgtgactttaatgttatccgcacggccttcgaccaactgaggatggaatccgcaatattccagcgcgctggcttcgtcggtaatagtcgcgccttcatttagagcgcgcgtcagacagtcatgtaacagctcacgagggaaaaattgcggcgtcagcgcgtgccataagccgttgcgatcaacggtatgagcaatggcatttttgcccggttcggcacgtttcatagtatcgcgcactggtgcggcgaggatcccccccgtgcggctggtttcgctcaacgccaacaatcgcgcgaggtcatcctgatgcaaacaaggacgagcggcgtcatgcaccaatacccactgcgcgtcgccagcggctttcagacctgccagcacggaatcggcacgctcatcaccgccatctacaacggtgatttgcggatgattcgccagaggaagttgtgcaaaacggctatcgccaggacttatggcaatgacgacacgtttcacccggggatgcgccagcagcgcatgcacgctgtgttcaagaatggtttgattaccgatactgagatattgcttaggacattccgtttgcattcgacggccaaatccggccgccggaaccacggcgcaaacatccaaatgagtggttgccatgttaattcccgggctgatttatcgattgttttgccccgcagactgtgcgcgcttgctcgcgtcaggcaccagacgataaaaagtttcgcccggcctggtcatgctgagttcattacgcgcacgctcttcgagcgcctcctggccgccattgagatcgtcaatttcggcaaaaagttgatcgtttcgcgctttaagtttcgcgtttgtagcttgctgtgccgccacatcatcattgacgcgggtatagtcatgtataccgttcttaccgaaccacaggctatactgtagccagaccagaatagccagcaacagcagcgttagtttacccatcctgccccctgaaaaacggcatcatcatcccatgcatccgaagacgactctacatcctctgttggggataccgcgacaacgcgggcaaatgtaccacatttgtccattgttacgtatacccagggcgtgcagaacataatctcattattagttacggtttgaattatgaacagaggagacgggaaagtacaaattagcccagtagccacataaacagtgcgccaaacataatgcctactgtcaccagggtgaaaacaatactgtagcgtagctttccgtccatcaaactatgcagcgcaatccccaccactaccgcgacgggcatcagcgccagaaagaaaggccaggtgtagataaagaagaacagcgtgttagagccataaatcaacatcggcatcgccagcgcaaataaccaggagataaaaccgaccacggcaccaggcagactccatgtggtttcttcatcctcagtaaggctgtcgttatttgttagtgtaatgttatggctattacgcatatttgatcctgttactttgacgaaccgggcatggaaacccggtggtgtctcaggatctgataatatcgttctgtctcaacagatctaataattgctgtaccaaatttgttactaattgttcaccattgagatgaatttctgcgctttcaggcgcttcgtaaacggaatctattcccgtaaagttgcgcagttcaccggcacgcgctttcttatataagcctttgggatcgcgggcttcgcaaatcgccagcggcgtatcgacaaacacttcgataaagcgcccttctcctacgcgttcgcgaaccatctggcgttcggcgcggtgtgggctgataaatgcggtcagcaccaccagtccggcttcaaccatcaaattcgccacttcaccgacgcgacggatattctctttacgatcggcatcgctaaaaccgagatcgctgcataatccgtggcgaacattgtcgccatccagcagatacgtactgacgccgagtttatgtaacgcctcctccagcgccccggcgaccgtacttttaccggacccggagaggccggtaaaccacagcactacaccacgatgaccgtggtgtagctcgcgttgttgcacagtgaccggatggctatgccagacgacgttttcgtcatgcagcgccattatttatcccccagcaaatcgcgcgcgccccagtgcggaaagtggcgacgaaccagagcattcaattccagttcgaatgcactgaattcagatggcgcagcagttgcctggctaactggctcgtgcaccataccggcacccacggtcacattgctcaggcgatcgataaaaatcagcccacccgtcaccggattttgttgataacgatctaacaccagcggctcgtcaaaagtgagatccacgaggccgatcccattcagtggcaggttttcaacttcacgctgggtaaggttattaatatcaacctgatagcgaatgccatcaacacgcgcgcgcgtcttcttaccggcaattttgatgtcgtaactctgccctggagaaagcggctgttccgccatccataccacatccacgctcgcgctctgcaccgccggtaacgcttcgtctgccgccagcagcagatcgccacggctgatgtcgatctcatccgtcagcaccagggtgatcgcttctccggcaaaggcttcttcgcgatcaccatcaaaagtcacgatccgcgcgacgttactttccacaccagagggcagcactttgacacgttgcccgacttccacgcgaccggatgccagcgttccggcgtaaccacgaaaatcgagattcgggcgattaacgtactgcaccgggaagcgcattggctgagcatccaccactcgctggatctccacggtttccagcacttcgagcagtgtcggaccgctgtaccacggcatactttcactttggcttgccacgttgtcgccttccagtgcagagagcggcacaaagcggatatccagattacccggcagctgcccggcaaaggtcaaataatcttcacgaatacgggtgaacgtctcttcactgtaatccaccagatccattttgttgatcgccacgaccagatgtttgatccccaacagtgtggagataaaactgtgacgacgggtttgatcgagcacgcctttacgggcatcgatcagtaagatcgccagttcacatgtgcttgcgccagtcgccatattgcgggtgtactgctcgtgccctggggtgtcggcgataataaatttacgcttctcggtagagaaatagcggtaggccacgtcaatggtgatgccctgttcgcgctcagcttgcaggccgtccaccagcagagccagatccagcttttcgccctgggtgccgtgacgcttactgtcgttatgcaggctactgagctgatcttcgtagatttggcgggtatcgtgcagcagacgaccaatcagagtacttttgccgtcatcgacgctaccacaggtcagaaaacgcagcaggcttttatgttgttgcgcaatcatccaggcttcgacgccgccttcattggcgatttgttgtgcaagtgcggtgttcatcttaaaaatacccctgacgttttttcagctccatagaccccgcctggtcgcggtcaatcacgcggccctgacgttcactggtggtggaaaccagcatctcttcgatgatttccggcagtgtttgtgcattactctccaccgcaccggtcagcggccagcagcccagcgtacggaaacgcaccatccgttttttaatcacttcgcccggttgcaggtcgatacggttgtcatcaatcatcatcaacataccgtcgcgttccagaaccggacgttccgcagcgagatatagcggaacaatgtcgatattttccagccagatgtattgccagatatcctgctcggtccagttagagagcgggaagacgcggatgctttcgcctttgttaatttgcccgttgtagttgtgccacagctccgggcgctgatttttcggatcccagcgatggaagcggtcacggaaagagtaaattcgctctttagcgcgggatttctcttcgtcacggcgcgcaccaccgaaggcggcatcaaaaccgtatttgttcagcgcctgtttcaggccttcagttttcataatatcggtatgtttcgcgctgccgtgcacgaatggattaatccccatcgccacgccttccgggtttttatgcaccagcagttcgcagccgtaggctttagcagtacgatcgcggaactcatacatctcgcggaatttccagccggtatcgacatgcagcaacgggaaaggcagcgtacctggataaaacgccttgcgcgccagatgcagcatgacgctggaatctttaccgatagagtagagcatcaccggattactgaattctgccgccacctcgcgaataatgtggatgctttccgcctccagttgccgcaggtgagtaagtcgtatttgatccataaccgttcctttgcaataccgctattttcttgccatcagatgtttcgactatagggagcgtaagagaacgaatgaaattaccaattagaatgagtagttccttaacggaataacgatttggcaaagctaatatcaaaaagtgcttaaggcaccggatttcgggcgtttaggaagatttgaaattgttttagcgcagcggcagtttcatactatggcggtaaaaaaatttgcatggtatttaaggactcactatgttttccgcattgcgccaccgtaccgctgccctggcgctcggcgtatgctttattctccccgtacacgccagcagtcctaaacctggcgattttgctaatactcaggcacgacatattgctactttctttccgggacgcatgaccggaactcctgcagaaatgttatctgccgattatattcgccaacagtttcagcaaatgggttatcgcagtgatattcggacatttaatagtcggtatatttataccgcccgcgataatcgtaagagctggcataacgtgacgggaagtacggtgattgccgctcatgaaggcaaagcgccgcagcagatcatcattatggcgcatctggatacttacgccccgctgagcgatgctgacgccgatgccaatctcggcgggctgacgttacaaggaatggatgataacgccgcaggtttaggtgtcatgctggaattggcagaacgcctgaaaaatacgcctaccgagtatggtattcgatttgtggcgaccagcggcgaagaggaagggaaattaggcgctgagaatttactcaagcggatgagtgacaccgaaaagaaaaatacgctgctggtgattaatctcgataacttaattgttggcgataaattgtatttcaacagcggtgtaaaaacccctgaggcagtaaggaaattaacgcgcgacagggcgctggcaattgcgcgcagtcacggaatagccgcaacgaccaatccgggtttgaataaaaattatccgaaaggcactgggtgttgtaatgacgcagaaatattcgacaaagcgggcattgctgtacttagcgtggaagcgactaactggaatcttgggaataaggatggttatcagcaacgcgcaaaaacacctgccttcccggcgggaaatagctggcatgacgtaagactggataatcaccaacatattgataaggctcttcctggaagaatagaacgtcgctgccgtgacgttatgcggataatgctacctctggtgaaggagttggcgaaggcgtcttgatgggtttgaaaatgggagctgggagttctaccgcagaggcgggggaactccaagtgatatccatcatcgcatccagtgcgcccggtttatccccgctgatgcggggaacaccagcgtcaggcgtgaaatctcaccgtcgttgccggtttatccctgctggcgcggggaactctcggttcaggcgttgcaaacctggctaccgggcggtttatccccgctaacgcggggaactcgtagtccatcattccacctatgtctgaactcccggtttatccccgctggcgcggggaactcccgggggataatgtttacggtcatgcgccccccggtttatccccgctggcgcggggaactctgcgtgagcgtatcgccgcgcgtctgcgaaagcggtttatccccgctggcgcggggaactctctaaaagtatacatttgttcttaaagcattttttcccataaaaacaacccaccaaccttaatgtaacatttccttattattaaagatcagctaattctttgttttcaaacaggtaaaaaagacaccaaccttaaaccatccaaatctaccggggtacgcctgtttaacccaaatgtctggaactcaaatcccgtttccgtattcgttgcccatgccatcactacattgccttcttccgccagtccagctatttgttcccagatcatttcacgaatttttgcggatacatcacctacatatacccctgcacgtacctccaacaaccagatggctaatctgcctcgtaagcgcggaggtacattttcagtgaccacgaccaacatactcatttcagctactccgatggcctgcatctcccagactaacaggaagcggaatggcaacaggctgtgcatcttcaggtggggccggcggttgtatttctccagcggcaagcacgtcctctataagcggaatcaatttggctaatgttttactactgcgaaaaatatccctgcacgccaaacggacttcccggtccggctcaccagggttacgacgcgctatctcaaaagctttcggtacaacagtgtcaaatttaatgatgtctgcaatatcgtaaacaaaggaaagaggctttcctgtatgcacaaacccaatagctggtgcataaccagctgcaagtatcgccgcttcagttacgccgtataaacaggaagttgcagcgctaatgcattggttgatcgtatcgcccttttcccagtctttcggatcgtagcgacgtccattccatgtcacgccgtattgcttcgccagaagtgcgtaggttgcccgcacgcgactgccttctatacctctgagttgctctacggagcgccgggcaggcgcaggttctccaaaccgaagttcaaacattttacgtacgaccttcagacgcaaatcttcatccagagcaagttttgcctgatagagcagcttatcactacgcgcacctccaggctgaccagaagcataaacacgaacgcccgcttcccccacccataccaacaatgttccaacttgcgcagccaggcgtacagctgcatggctaacccgtgtaccaggttccagcatgatgcaggcaacgctgccaacaggaatatgagtgcggatccctgtcttgtcgataagtacaaacgcgccatctattacatcgatctgcccatattgcagaaagatcatggagacgcgatctttgagtggaatgggattaaggggaagccaggtcattttattacacctcaatcacagtggagccaaagatagcaagccacatcccatgcttttagctggcccaataccttgctgtacaagatctattaacgctggcgcgtcgttgatggtgagcacaccttcaaagcaaaccgtttggatctttccacttttaccatcaccagaaaaatactgtggccgttcgcttatgggatgcacatcttcaacgcgcgccgcattgcccaatttacgttgcaaccacgcgatttgttctgcttcttttattaacggaacccgacagcgtttaatattccctttactgtccaggcgcttttgattgtcgagaatagttttgatcggatttgcccgaagccgaaaatagagtggaacaccaacctgaagttgaaattcaacctgtttagttttaatgactgtcgcaacggcagtactaacaggcatttgcgcactctgcaataaaacatgacagccttctggtgtgtttcgcttctcaacatgaaaaagaaaatcacgagcagcatccggtctgtttggaaataaatgccataatccctggtgaagttggtaaagatccctgctccaggccctggcaatgatgactttactgagatacatccatacctcctttaatcacataccattctcgggaagcaaattgtcgaggcaaggtgatcatcggttcgtcgcgcgccgtaaattttaaatgatgccctgtaacactttcctcactatatatatcgccgccaacgggctcataatttaatagcgccttctgaggatcgcttgcctgacatgtccccaaaaaaagcgggtgtgttagtgggcaacttctccgccccaggtaaggtgtataccgaggctttaatactgctttttcaagttcactgataaccatcgttgcatggggtgttaaccagagagcgacggtaaaggaggcatcacataaatattcgcgccatgtttgaatcgtttcatgacttttcaaaccacggtaatcttctcgcgctccaaggactgtatggtaatcacgcaaccccgttacagacacacgacgatcgtcaagaatgagttcatcgcagcgcactgcaaattgcacactctcacttaacgcctgtaaactagaagtatcatcacgttggatcccaagacaagccccgagtagccctaataacccgcttcgggtcggaaatcttccggtaggtcgcgttccttcaaaggtcggctgcccccaggcttgcattggcccagcaagccgcaagatcaaataagatctcatgttcacgcctcgccattattacgaacccaggattttaactgttctaaagtaggcatttgtttaacttgagcagtaattgggtctacatcagataagctgaattgcgcagcagctccgttcagaccatatccattggcaacgcgatcccaatattgattaaacgcctgtatagacggttgcaaaaagccatctttcgctttaaccgctttttcaaaagcatttgccatagaaagtggcatatcggagaaattaaccattaccatatccgcagggttaaaagcggcataagtacgctgttttgctccagggacctctgttgccagcatatgaacaacatgggttgcaatttccagagcctgctccctggaggcaccacctaaattttcctgaagttgagcgaggttaatgttggcataacgataaaaaacaccgctactaaattcctgagttcccagatgtgcagaaccttgttcctgtaaatcatctacagcggtgaaccagtcaatatcagaatcaacctgatgagtagtgatcgcatgcgcaatggacattgcaccatcaacttttcccaactcagtcatcatgccgctggttgccattcttccactaagcgcaatatcaacaccctgctgtaaattcacacgtatggcggcaatatcttccttaagaactttgagcagctttttatcatccagattatcagcctctgcttttgcaacctgctcacagaaccaggctatttctcccacaacccagggagtaaccgcatcggcagaaatcttttcggcttcatcaacacttttaccggagagcagcgctaatgtcttatcgatgattttttggtcaaaacgttcaccaagtttttgccgaagaacatcacgtaattgtgcaagatgaatggttctgagactggattcaccaatattttgtgcgtaataaccacttttacgcatcgcacgtttaaggctttgactactaattcttactcgtcttttgccgccgaaaatagcgtctttctgcatgttcatatcgtcgcggttcagacaactagggctgtgagagatcagaacatgaatattgataaagttagacatagaaaggtttccttacgcatttttgtttgtggtcaatacaaaatcttccagaagttgctggcgttcgcgctttccccaccaggtcaacatcctggccattaatggccagtcaagtacgggttcggcgtgagtaagtaatcgacgtaactggaccatatcggctgttctgtcagcccgaattaattgaaagatacggcgctcgttaattcttccactattggctaaagctcttcccaagctgatacctgttgtttgctcgctttttttgtcctgatgtcggatgacattctttcctgcgctcaggcaaaacaccatgcgcaaaagagcctgctggtgacgtgggttttcccaaccaaaaggttgcaccagcctataaaacgcagggatatcgcgtaattcatcaggttcactaacacgtctaatttgcgcacaacttccattatccagttgttgccaggctcgatataaagccattgcatcaatttcatcagccattacttggccctccttgcggttttaactcccgtaaatgtttgtatagcgtggcgcgggcaagcgctaatgtgcttattaatttaggatgatgtgcatagggagctacagattgattaaatagcatttcacacaattgatgaagtttgtctcgtaaatcagctattacctcatcagcctgggaaaaattaacattcgccagtacatcgggaattaataattcactctgtcgatagaaatgcctttctgcagtctcatgaacagagactccggcccctttgaagtctttatttttaaacccttctgcaaaggtatataacgccttgcgtaaggctgttttatatcccaaaccaacagtcactatttcgtttatcacattgccgtattgttgccacccctgattaaacatcaacacatcatgacgccgttcaagaatagatgcttgattattacgatatccccccataatcaattcaagaggactttgcggcgcaatatttctgaattgattcacaaccgccgccacgcgatttccattttcattttgaataatcttatctaccacaactcggctgatttgtgtccaacttggtgcggaggtggtgaaagcaagaaatttttcctcaacctcccctttcttgactgttaccagacaaggggaatgcggatggggccatagcccattaactgtaaaggtaaatttttccttaagaaaaccggtataacgcaaattgctttcctgtccacagcaagaacatttaccaatcccaatgggatcgcataattcaatatgcgctggttgccagaatagaccacggacaaacccaatactgctagcaggtatagactcattggacttgataggtttaatccaggtaggttggttttccgtatgactttcattaggaaattgtttttgaagacgaggtaatgtgaggacattgagtaacaccgtactacgaagatcgatcccacgtacgaacgttgttacaggtgttcctccacgtaaaccgcttttaaaaccaccaccaaaacctggtgcctgattcgcctggttgaataacgcaatcgcagtgcatccaccacataatgcttcaccctgccccggttgattgacaaatgcacaattcgtcgcgccgcttaccccagccaacagtttttccattggagtcacatcatttgctttgacacctttggtctgcataaagggatgttctgcgtgattaaggtagaacatatctatccacggcgcgatgagttgttgaaactcatcttcagtgagcggattcattatgcgatgtcgaaattcaacgtcatcttttgccggggcgataatttgcccaatgcaaaccagcagtgctaaagcggccagttccatatcgtcacggggcaaacttaatcgccactgatctctactgcagtataggctttgcagatttatgatttggactttccccccgtttcgcgggcgtacagggatccagttatcaataagcaaattcatttgttctccttcatatgctccgacatttctcctgcatttctatacgtcggcacacttccgttatcggtaaaaacaaagaaaaaatacggcgtaattaattcaataatcacattcactgcaaaaatatattcattggtttaatacaattaacctatacatatattaagatgtgttgaattgtttaaagacaataatgcatgcatttcaaatctgcaagttattcgttttattattaaagaaacttttagttataataattaccatgaattttattacataaaatattcatactgtgaatataaaatctcataccgggaaattaaaagaagatgtacattgtgcaccttccctacttaagtagggataaaccgttattggtcttattatcgtcattgataacaatcattcccgaagttatttgggatttgcagggatgactctggtcatcccttcatcccctgtataggtaataacaatactgttaccctgccagacccatccatccagattctgtttcccttccagccaaagtaacccatcttcatctactacttcagaaaaactacgtttccaggtgaagggtacattgacgcgattaagtgcaagcgcctcatactgctgttcatgacttaggtcctcgtagacctggccatcgagcagttgtttaccactagacgtttgtacataaggcaataatggcaggctcatttccccatccctcgttaccgcaagaatggtttcatcgttatcctgcaagctatattcttcagcccactgcaggaccttgcgagccttgaaccttttttcacactcggcgctttcaaatttatccatgccattgccgacccattctggctcatccatttccgcatcatcgtaaatgctatccagccattgccggtaagcatcagggaaaaataaggatgctccattaagctcctcaatatgttgctgcgtccgccacatgactctaacgttgctataaatatgctcatgtcgtccgtaaccctcgccatcaggcagcaaaatggtggcaacaggaatctcaaaaccagcgggacgatatttgcgatgatggcgatgtaaacggcccaatcgttggaaaagcaaatctgcaggacaatgctgagtaattaaccaatcaaaatcaacgtcgagactttgttccacgacctgggttgcgacaagtatccgtccaacatttcgcttcccatttttgccgaaattgctaataactcgattctctttttcacgacgatcgttcagcgtaaagcgcgcatgaaacaaatctatatctacttgcgtgttatttagctcctttagccgttggtagcatacttgtgcaacgtcaaccaaattgcaaataagacagacctgtgcacccgcgtttgccgctgcgatcattcgctctaacatcgtaaggtcaggtaacatgtcagctaaacaaataggttctggctgaatgctaaagcggggcgggagttgttctggatgagctagcagatcaaaacgttgcgcaccattcacacctcgccagttaatgagtggatatgcggagttattttccactggatctgtatgcagaccataagtatccagaagtttctgtttttgtttcattggtagggttgcggaaagaagaataacactccctcccacatcagcctgagccttgagcactgcctccagcaagccgttcatataggtgtcgtaagcatgaacttcatcaacaattaaaacacttcgaccaattcccaaaccacggataaagcggtgtttaactggcaatacgcttatcaacacctgatcaatcgtgcaaacgccgatttgcccaagaaacactttcttattgctttgactcaaccactgacaacactgaacccacgcttcttcttgcccctgttcagtaatcgcgcgactttttatactttgaaagaggtggttaaaccgactattgccatgagcaagaataagatttggggaactaaataagtggctcgcgctcgcttccattctcgtaagcatagcattcgcggtagcttgtgttgggagggcaaaaataacactatccgcaatttgttgatcaataagtttccaagcataggccagcgctgtttccgttttaccggagcctgtaggtgcctctattaccgtcagcccgggagctactggaagagcatcaactaacacctgtaattgtctgggttgatagccattgtccagtagtgcatgaacaccttcataacatcgcttattacttacaagtccactcaactccaatacccggctcgcatcctgctgtcggtcctggaaatacgttctcagagcatttatgtcggaaggcgcatcctcattaaacagaaaggtattcgttgtagtccaggagcctaaccagtcagcaaggctgcaaaaacctgctaacagactactacaatcaggtggtatatcgtttatagataaccccgctggcgttaaaaataatgcttccagtacagatatccactcctcacgagcctgtttatcttgcgcagcataagatgccagagaagctggcatttcccaacggctcttatcttgatcctgggaatgtaatataaaaccatgatgtcctgtaacggcctctacccatggaaaccaggactcataaggatgaggagcggcatcaaaaaaactgaaaaaatccccgagagattgctcactaagactatcctggttaaaccaatacagaccggctgcaccatgattaaatttacggcacatttgtgtacttggaccattaagacttggcgttgcaggatttaatttcagccaactttctgcacttttatattggaatcgtatatcaaactttccaatatcatgaagagcaatgaaaaataacagccaggccttcaccctctgtttacttagcatttcatttcggcaaaaagtattttgcagtacgacactttgatcccaccagcaatctgcaacagcagcaacatcaaggcaatgataaattaacagatgaatatcatttcctttcgtcaagcttttactggattttccccagtaatggcatatatatttaaaaggttccattaatagcctccctgtttttttagtattatcgatgatatcagcgggctatttttcgatgctgctcataaatatcgaattacagtgatatacacatgtcttgcctccctgcaaagaagagactaacattcgaattgtttgggttcgaacgctggcctcaggttgatagaaatatcgcctggggcttttgtccatctggaacctcgcgaatgcttaacgccagacagcctcaagcacccgacgccattctatacctgataattcttcccgcggcgttcacgtttaaaatcaggaatgctgctcgcaaaataaaaacgcccccatcatttctgacagaggcgtttaatttgtccggcaatatttacccttcgtgtaacccacattccctttttaagccaaagaaacgcgtttcttcttccgccatgccgggttcccatttacgggttgtatgggtatcgcccacgcttaaatatccttcatcccataatgggtgatatttcaggccatgtttttgcaggtactgataaatagttcggttatcccagtcgataatcggcagcactttaaatacgccacgctgaattgccagcaccggtaaattggcacgactgccggattgttcacggcgcaggccagcaaaccaggtttgcgcattcagttctttcagagcccggttcatcggttcgactttgttgatgtcattgtacttttcaatgccttcaacgccctgctcccacagttttccgtagcgtgcttcctgccaggctgcgctttcggtagcacggtacactttcaggttgagcttgagtttgtccgttaactcgtcaataaagcggtaggtttccgggaacaagtaacccgtatcggtgaggatcaccggaatatccgggcgaatttgattcaccagatgcaggctcaccgccgcctgaatgccaaagctggaagaaagtacatattcaccgggcagattatccagcgcccaggctacgcggccttcagcgtccagtttttccagttcggcgttagtttccgccagcgccagaatgcgatctaccttcggcagttcgttcagggcgtttagatcgagtttggacatagattcctcactgtttgccttgcctgatgcgacgctcacgcgttcttatcaggcctacaagaccgggctgatggttaatcccacaaatcacgcgccggatcgagcaccgggcgaatgatgcccgcacgcaccgtaaagtcgccgaagccttcacccgcttcgcgctctttcgcccagcgccctatcagttcatcaaggctcgccaggatttccggctcggtgatgttttctttatacatccgtgggatacgtgtcccaatgcggttgccgccaagatgcaggttgtagcgacccggcgctttacccaccaggcccacttccgccagcatcgcgcgaccacaaccgttcgggcagcctgttacacgcatcacgatatgctcatcgctgacaccatgtttcgccattaaattatcgatgttgtcgataaaagacggcaggaaacgctctgcttccgccatcgccagcgggcaagtcgggaaactcacgcaagccatgctgttttcacgctgcggcgtgacggcattcattaacccgctctctttggcgatcttctcgatcttcgctttctcgctttccggtacaccggcgatgatcagattctggttcgccgtaatgcggaaatcgcctttgtggatcttcgcgatctccagcaggccggttttcagcggacgcgccggataatcaaggatgcgaccattttcgataaacagcgtcaggtgccagttatcatcaatgcccttaacccagccaatacgatcgcctcgtccggtgaactcatatggacggatcggttcaaatttgatccccgcgcgacgctccacttccgctttaaacgtctcaacccccacgcgctccagcgtgtatttggttttggcatttttacgatcggttcggttaccccagtcacgctgagttgtcacgacggcttcggccaccgccagcgtatgctccagcggcagatagccaaactcactcgcggtgcgggcgtaggttttcttgttgccgtgttcgatggaaagcccaccgcccaccaacaggttaaagcccaccagcttgccgttttcggcgatcgccacgaagttcatgtcgttggcgtgcagatcgatatcgttctgtggcgggatcactaccgtggttttgaatttacgcggcaggtaggtctggccgaggatcggttcttcatcagtagtggcgactttttcctggtcgagccagatctccgcatacgcgcgggtacgaggcaacagatgctcagaaatcttcttcgcccactcgtacgcttccgcgtgcagctggctctcgtaagggttgctggtgcagagtacgttacggttcatgtcgttagctgtcgccagcgcatcaagaccgacgctgtgcagcatctggtgcaccggtttgacgttctttttcagaatgccgtggaactgaaacgtctggcggttggtcaggcgaatgctgccatagatggtgttttcaccggcaaatttgtcgatcgcctgccactgtttagtggtaatcaccccacccggcagacgacagcgaagcagcatcgcgtggcgcggctccagcttctgttcagcacgttcggcgcggatgtcgcggtcatcctgctgatacatgccgtggaagcgaatcagcaggaagttgtcgcccttaaagccgccggtcagaccgtcgtttaaatcttccgcaatggtgccgcgcaggtagttgctttcatgcttcatgcgctcggcgtctgtcagttttccttcgaccactaaaggccctggatgtttttcgctcattagtagacatctcgctgataacggcgctctacgcgcagctcacttaaaaattcatccgccgcttcggtgtccatgccaccaaattcggcaatcacttccagaagtgcctgctcaacgtctttcgccatgcgattagcgtcgccgcagacataaatgtgggcaccatcattgatccagcgccacagctccgcgccctgttcgcgcagtttgtcttgtacgtaaactttttctttttgatcgcggctccaggcaagatcgatacgtgtcagcacgccatctttgacgtagcgctgccactccacctggtacaggaagtcttccgtaaagtgcggattaccaaagaacagccagtttttacctggcgcttcgtcggcggcgcgttgctgcataaaggcgcggaacggcgcaataccggtgcctgggccaatcataatcaccggggtttctggattggctggcaggcggaagttatcgttatgttcgataaatacgcggacttcgccctcttcttccacgcggtcagcgaggaagctggaggcaccaccggcacgggcgcggccttccacgtcgtaacgcaccacaccaacggtgacgtgtacttcgttctcgacttccgcctggctggaggcgatggaatacagacgcggcgtcagcgggcgcagcagattaattagcgcttcggcatcaagctgtgccggggagaaacgcaccatgtcaacaatcggcgtcgtcgcggcgtaatgctgtaacttcgctttatcgcccaccagcggcagcagtgtttcactgcgggtaagcgtggcgtaattctcaacaatgttggcggtgttgacggtcagttcgaagtgccactgtagcgcttcgttcagaggcaacgttttgccctcgacggtgacaggttcatcgcctttcagccacagcagttcgacaagttctttcaccagtgccggatcgttctgataccagacgcccagcgcgtcacccggctggtaacgcatgccgctgtcacctaagtcaatttcgatatggcgaacgtctttttcagagttacgcccggtaattttctggttaacagagaggctagccaccagcggcgcgtctttgctgtacgggctggtgtggatttcatttaccgcgccagtagcgacggattggctaggtgccgcgacaggcgcacggcttttaagcgcatcaaccacgcgggcgcgccactcgctggcagcagcctggtattcaacatcggcatcgacacggtcgagcaggcgttcaccacccagttccgccagcttgctgtcgaaatctttcccggactggcagaaaaattcataagagctatcgccgaggctaaacacggcaaacgcggtgttttccagctttggcgcttttttggagaacaggaacttatgcagcgcgacggcttcttccggcggttccccttccccttgcgtactcgtcactacgatgagcagtttttcgctggcgatttgtttgaatttatagtcgcccgcgttcaccagcttaacgttcagttttgctgctaataaatcatcacgtaatgcttcagcaacccggcgcgcattgccggtttggctggcggagataatagttatacccggcatttctgcggctggcgctggcgtcgctgcaagcgcagcaggctgctgattgagtacgccccagaaatagccagaaacccaggcaagctgggtgggagttaaatcggtcgtggccgcctgaaggcgtgccagttgctccgggttcaacggaagcaacgcggaaggtgggacctgtgtcgtcatgcgtcgttatgttccagtaagcaaagctgtttctgcgccctgtcagcgcccataaaacagaagagaaggtaaggttaacggggcaaacggtgtggattaaagacgggatagcgataactaataaccaaatcgactaacctgttttagcaatagtctttaacaacaaaatagattaaccaacctaatgaaaaacaaatgaatttagccaatcattaagataaatcagcgattttgcgcaacaaagtcgttttagataatgcgaaaaaacagcctttccggtactctacggcggttttatcgtcctgtagagaaattatgatgtccaccacgttatttaaagatttcaccttcgaagccgctcaccgcttaccacacgtcccggaagggcataaatgtggtcgcctgcacgggcattcctttatggtgcgactggaaattaccggggaagtcgatccgcatacgggctggattatcgatttcgctgaactaaaagcggcgtttaaaccaacctacgagcgcctcgatcaccattatctcaatgatattccaggtctggaaaacccaaccagcgaggttttagcaaaatggatttgggatcaggttaaacccgttgtgccgctgttaagtgcggtgatggtaaaagaaacctgcaccgcaggttgtatctatcgcggcgaatgataagagtgtgtcggcggtcaatttcccttaagtaacgctatgttagggtgttgtgttctggatatctggggcatgacatggaagacgactgcgacattattattattggtgccggtattgcaggcaccgcttgcgcgttacgctgcgcgcgagcgggtttatccgttttgttactggaacgcgctgaaatccccggcagcaaaaatctttccggcgggcggttatatacccatgcactcgcggaactcctcccgcaatttcatctgaccgcgcctcttgaacgacgcatcactcacgaaagcctttccctgttaacgcccgatggcgtaacgacgttttccagcttacagcccggcggtgaatcctggagtgtattacgtgcacgattcgatccgtggctggttgccgaagccgaaaaagaaggtgtcgaatgcatccccggagcgacggtggatgcactgtatgaagaaaacggcagagtctgtggcgttatttgtggtgacgatattctccgcgcccgttatgtggtgctggcagaaggtgccaacagcgtcctggctgaacgtcacgggttagtgactcgtcctgctggcgaagcgatggcgttggggatcaaagaagtgctgagcctggaaacatccgctattgaagaacgttttcatctggagaataacgaaggcgcagcgttgctgttcagcggcaggatctgtgatgacttacccggcggcgcatttctttatactaatcaacaaacgctcagcttagggattgtttgcccgctctcttcccttacgcaaagtcgtgttccggcaagcgagctgctgactcgctttaaagcgcatccggcagtgcgcccgcttatcaaaaacacggaaagtctggagtatggtgcgcatctggtgccagaaggtggcttgcacagtatgccggtgcaatacgccggtaacggctggctgctggtgggcgatgcgttgcgcagttgcgtcaataccggaatttccgtgcgcggcatggatatggcgctgactggcgcgcaggcggcggcacaaacgctgataagcgcctgccagcaccgcgagccgcaaaatctgtttccgctttatcatcacaacgtagagcgcagcctgctgtgggatgttctacagcgttatcagcatgttccggcgcttttgcaacgcccgggatggtaccgtacgtggcctgcgttaatgcaggatatttcccgcgatttatgggatcagggtgataaacctgttccaccgctgcgccagttattctggcatcatttacgtcgtcacggcctgtggcatctggcgggcgatgttatcaggagtctgcgatgtctgtaacgtaagatgttatcaggagtctgcgatgtctgtagcccgtaatctctggcgcgttgctgatgcgccgcacattgttccggctgactccgttgagcgccagacggcagaacggttgattaacgcctgtccggcaggtctttttagcctcacaccggaaggtaacttacgtattgactatcgcagttgcctggagtgtggcacctgccgtttgctgtgcgacgaaagtacactacaacagtggcgctatccgccttccggattcggcatcacctaccgctttggataaataataaggataatttatgcccctcttacacctgctccgccagaatccggtgattgctgccgttaaagataatgccagcctgcaactggcaatcgattctgaatgccaatttatttccgtgttgtacggcaatatctgcaccatcagtaatatcgttaaaaagattaagaacgccgggaaatatgcttttattcatgttgatttgctggaaggcgcgagtaataaagaagtcgttattcagtttttgaaactggtgaccgaggcggacggcattatcagtaccaaagccagtatgttgaaagcggcaagagcggaaggttttttctgtattcatcgcctgtttattgttgatagtattagctttcacaacattgataagcaagttgcgcaaagcaatccggattgtattgagatcctgccaggctgtatgcccaaagtgctgggctgggtgacagagaaaatccgccaaccgctgattgccggtgggctggtgtgcgatgaagaagatgcgcgtaatgcgattaacgcgggtgtcgtggcgctttccaccacgaataccggggtctggacgttagcgaaaaaattactttgacgggataatcgtaaccaattgaatttggtttgatttgtaggccgcacgccacatccgacattcagcgcctgatgcgacgcttgacgcgtcttatcaggcctacaagtccccaggccagaaccgtaggcaggatcatccggcaacacgttattggcaatctgcgtgaatgtttgtcaccagtgcctccagcaccactttccagtcatcaaccacgccaacatctgcctgactaaataccgcagcgctggcgtcatgattaatcgccaccacaaacttgctattgcgtacgcccgccattaacgctgctgcgccagaagcgccaacaacaatacacacctcaggtgccagcagatgtccggaaataccaatcactttttcagcatcaacgccaccgttcatcactcgcgcccgactgtagcccacttcggctcccagcttttctgccagcatagcgatttcctggttatctgcctctccgccctgccccaccaccagcacccgtctggcctcagctaatgggtcgcgggtaacatttttcagatcctctgtgctaaccagccagtccggaagcgcacccgggacaatgttcagttgttgcattccagagggcaacgtggcgtttttcgctgctcccgcctgacgcgccagggaaaggcatagcgggcgtttttctgtttgcagcgtcgccgttagcgcatttccccagtgggatttgcgcacgcttacggttggaatatctaagctagtcacctggcagatgcttgcaccatgtaaacgccaggccagccgggtgctcagttcatcgccaaacgttcccggcggaaagagaacaacgtccgcaggcgttcgctgccactgttccaccaacgcatccagcacctgttccgccactacaggctgaggttcaatctgccagtgcgccagggtacaaccgctgaaatcctgcgccgccagccagcttgctattgcggcattctcctgatttattgtcacaattgcgatattcatggctgcatcctttggcgtaaatagtcctgccatagcttttgagctttttctgctaccgtttgcccatcaatcagcgtcgctccgcgtcgttgctctgctcttgccagttgcagacactgcatcgctggcatttcggcagcaacagttttacggataatttctgctttccccgcagccattcgctggcgcattcccggtactggcaaggccacttcaccgcactgacgcacggcaatcaccgcaggcaagcgaacccggcaacaacgcaacccatgttcagtacgctgttcgagggtgataaacagcgcgtcgagagtgaaacgctccacctgggtgaagcagggccagcccagcatttccgccagcaaaaatggcgtttgcccattctgcccttcgctgctttggcagccggtaattatcagatccagcggattctgatgctgccattcggcaatatggcgagcgacaaattccggcgcaaagcgcagatctgccgccgtctccagcaatacagcttcctcaaacccaagagccatgagatagcgcagccagtgcaatgcccgttcatcccccatgctcaacgcggttaaagacatcggcgtaccgttttttctctgcgccaacagcagcgcggcagcggcctgttcatcagcaccgagtaaacttcgcagtaggctaatatccggtccgcttttaccctgagccgccgcctgccactctttttccgccagcattccggcatccggttcggctttaaacgctaacagaatgttcattcgcacctcctacatttcccgccgccaccagcgggagggctttagtttctggtgcccatagccaggtcacaacaaaaccaaccaacaacactgtcgccaggagcaataaggtgacttgcattccccactgcgccagcacccacggcagcaggccagtacttaccgccgcgccaagtcgactcatggcagtggcaaaaccgacgcccaggctgcgaatgtcagtaggaaaactttccgcaggcaaaatgcccaccagattactgactgcgctaatggtggtgctgaagagaacaaaaagcagcagcgttaaactactgccggaaggcaaacaggccatgactaccagcgttgccgccagcagcaaaaaacttcccagcaaaaatttgcgatgtgccagcaggtgcgtcagaactaatcccagcagcgcgcccacaattaacaacgcattaagcatcaggctggcagtcagcgcatcttccagaccaatagtctgggcgatagttggcagccaggtataaatcacaaaccatgggattacgaggcagacaaagaagacgctgttaaacgccgtgcgccgccagtaacggctagagaacaaggttttgatgtgtttatgggtcgccgttaccacttcatcgcccagtaaaacatggggaccaaaatagcgatgcacgatagcgtgagcttctgcaaaacgcccctggcgcagtagccagcgtggactttctggcgttccccagcgtaataacgtaatcaacaacgcgggcagagctgcgcttgccagtagccagcgccaggcctccgggttttcggaaataaagtgatgtccggcaatacttgccagcacatagcctacggtccacaccacgctgaatgcgcccagcaaaataccgcgatggcggcgcggggaaaattcagccagcaaggtgtgacctacactataatcgcctcccagaccaatgccaatcaaaatgcgcagtccaataagatgctctggcgtggtggcaaaaaattgtaaaaagctagcaagcgtaatcagcaaaaagctgaaggtgaagattttttgccgaccaatatggtcggagatccacccaagaaccaggctgccaaggaacaaaccaaggagcgcgctgccgccgatcattcccgccataaacggcgtcagttgcatggcgggcgtaagctgaataatggcgtaaccaatgacgccgagaacataaccgtcggtcaggtgtgcgccgaaagtgagcgcagcaatgcggcagtgaaaacggttaagcggtaaatcatccattcgcaccggactagtgttcatctttaccccttcattgtccggtaataagaacggcttctcgcctgagaagccgaaaaggcaacgccccgtcatcgcggaacgctgcctgacacattatttttcaatcggatagatagtacccgtattcataatgccattaggatcgaactgctttttcagcccttccagcaacgcccacgcgctgccgtgttccagtttgctccagtgaacgcgatgtttaccgataccgtggtggtgcaccatgctaccgccgaggcgaatggtttcttcacagatgatcttgttgagcggattgtggtacttgtcgatttcctcttccggcttacagtcaacgacgttgtaatcgtagacgaagtacatgttggtgccgttctgatagctatgagaggaatgaccgcccagcatggtgatgtcgtcggcgtgcgggaactcagtacgaatacggttaataacgctttcgtagatttcgtggatgcagctccagcagccggatacttcggtggtaaagcccatgttgccggttttgaggatctgcacacgttcggcagccactttatccggtccccagttcaggttgttaaaccaggtttcgatcagcttgctgtccacgcgctggcattgcgggtagcgggcaacgatttccgcaatcccttcgcccgtcaccttcgcaatgcgagggttaccttcagccataaagatcagcacgcattttccgtcggcaaaatgggtgaagtgttgggtgccatcttcagcgtcatacaaacgagcgatactcggacgatacccttccaccatgatttcacgcaggatgttgaagccggttttcatgtcttccaggatatagccgtagaagaggttgttttccggggtgaatttaaagattttcactgttacttcagtgatatagcacaatgcaccttcgttgccgatgatgatgtgacgaatgtccgggccagccgcgcggcgtggcacgtttttaatgcgtgtgacggtgccatcagccaatactgcttccagaccaacgaccatatcttcgattgcgccgtagagtgtggagaactgcccgatacttcgggttgctaccaggccgcccatctgcgccagcggcttactctgcggagaatgccccgtggtgtaacctttttcacgcaacgcgttttccagcacttccagcggaacaccacattgcgccgtcgcctgcatattctcaatatcaatattaatgatttgattcatggcggagccgtcgagcaccacgctgttttctacaacagtttccagcccaccttcggtggcggaagcaccggtacgcggcacaccgttaattttgtgcgcattcataaaattcagcacacgggatacttgctctgtggaaccgagttttacgaccgctgccggaatcggcaaagtataaatgccatgaatatccggaaatttacgaaaacggtcaatactgtttttctttaatactgtttcatcggtaattacgcgatctgcaccaacaatttcctttagctggtcgacaatcgctgcgcgagataaagacatagtaattccttcctgataataaaaatggaataatcattaataagagaaaacagaaaccaccgttatgggttagcgcactaaataaccgccatcaaccactaataaatgcccgttgacataattgcttgccggacttgcgaggaatacggctgcgcccattaaatcctgagtatcgccccaacggtttgccggaatatgatcaagaacgcgctgattggtttctggattactgcgtgtcgccagcgtaatatctgttgcataatagccaggggcgataccatttacctgaatattatattgacctagttcatcacaataagctttggtgaacccggcaagagcatgtttagtggcagaatatgcaggactccattgtccacctaagtaagagaacaaactacagatattaataattttgccgcttttctgcgggatcataatttttgcagcttcatagcttaactcgaatgcggcggtcaggttcacatcaatcatcggatcccagtcggcacgaccgaagtccagcaccttattcagcttacaaataccggcattgttaaccagaatatcaactgtaccgaaacgctcacagcaagcagcgataatcttctgcggcgcgccttctgcggtgatacccacctgcatgaagtccacctcaacaccctgtttttcaatcatttcctttgtttcgccgttatctttgacgaaactaggaataaagatatttgcgccagctttggccaacgccatggcaaatgcctggcctaaaccgctattcccaccggtaacaattgcggttttacctttcagggagaaaaaatccatactgaacgcattgagagattcgatactcatagttagctccaatttccgtaaggcaaaaaaaaagaaaggtaacttcccccgcgagagggaagttacctttctcattatctctggtaactggagataatttttagcataagggcataactgctaatgtgatcgtaatcacagtgtgatattcgtattgtcaaataattttaaaaagcagaagcgtgattactctcacacaacacctctgctttccatgttatttattatttcaattactagagacctgagaaaagtaatccacctgaaagggcggcttacttttctcttttttttgtctattacaaatgggaatacgatatgcaacacaacagttatcgccgttggataaccctcgcgataattagttttagcggcggcgttagtttcgacctggcttatttacgttatatttatcaaattcccatggcgaaatttatgggattcagcaataccgagataggtttaataatgagtacctttggtattgcggccattattctttatgcccccagcggcgttattgccgataaatttagtcaccgcaaaatgattacttccgcgatgatcattaccggattactgggtctgttaatggcaacgtatccaccgctgtgggtaatgctctgtattcagatcgcctttgcgataacgacgattttaatgctgtggagcgtgagcattaaagctgcaagcttgcttggcgatcatagcgagcaagggaaaattatgggctggatggaagggctgcgcggcgtcggtgtaatgagcctggcggtgtttaccatgtgggtcttttctcgctttgcaccggatgacagcaccagcctgaaaacggtcattatcatctatagtgtggtttacatcttgttggggattctgtgctggttttttgttagcgataacaacaacctgcgcagtgccaataacgaagaaaaacagagtttccagcttagcgacatcctggccgttttgcgtatcagcaccacctggtattgcagcatggtgatttttggcgtcttcaccatctacgccattctgagttactccaccaactatctgaccgaaatgtatggcatgagcctggtggcggcgagctacatggggattgtgatcaacaaaatattccgcgcgctgtgcggcccacttggcggcataatcaccacctacagcaaagtgaaatcccctacccgcgtgatccaaatcctttccgtactcggcctgctgacgttaactgccctgctcgtcacgaactctaacccgcaaagcgtcgcgatggggattggcctgattttactgctgggattcacctgttacgccagtcgcgggctgtactgggcctgccctggcgaagcgagaacaccgtcttacattatgggcaccacggtaggtatttgtagcgtgattggattcctgccggatgtcttcgtttacccaattatcggccactggcaagacaccctgcccgctgcagaagcctaccgcaatatgtggctgatgggcatggcggcgcttggcatggtgattgtctttacctttttgctgttccaaaaaattcgtactgctgatagcgcccccgcaatggctagcagcaagtaagccaggaaaattacaggagaaaaatcatgagcaaaaaatacatcatagggattgatggcggaagtcagagcacaaaagtggtgatgtacgatctggaaggtaacgtggtttgcgaaggcaaaggcttattacagccgatgcacacgccagatgccgatactgcagaacatcctgacgacgatttatgggcaagtttatgttttgccggtcacgatttgatgagtcagtttgccgggaataaagaagatattgtcggtattggtctgggatccatccgttgctgccgtgcgttattgaaagccgatggcacgcctgctgcgccgttgattagctggcaggatgcacgcgttacacgcccttacgaacacactaaccctgacgtggcatatgtcacctcttttagcggttatctgacgcatcgcttaaccggcgagtttaaagacaatatcgccaactattttggtcagtggccggtggattataagagctgggcatggagcgaagatgctgcggtaatggataagtttaatatcccccgtcatatgctgtttgatgtgcaaatgcctggcaccgtcctcggacatatcacaccacaagccgcactggcgacacatttcccggcaggactgccggttgtttgtaccaccagtgataaaccggtagaagctctgggggccggattactggatgatgaaacggcggtaatttctcttggcacttacatcgcattgatgatgaacggcaaagcactgccgaaagatccagtagcgtactggccgattatgtcttctattccgcaaacattgctgtatgaaggttacggtattcgcaaaggcatgtggacggtgagctggctgcgcgacatgctaggcgagagcttaattcaggatgccagggcgcaggatcttagtccggaagatttactcaacaaaaaagcttcttgtgtgccgccaggctgtaatggtctgatgacggtgctggactggctgaccaatccgtgggaaccgtacaaacgcgggattatgatcggctttgattccagcatggattacgcatggatatatcgtagcatactggaaagcgtggcgctgacgctgaagaacaattacgacaatatgtgtaatgaaatgaatcactttgcgaagcatgtgatcattactggcggcggtagcaacagcgatctgtttatgcagatttttgccgacgtgttcaaccttccggcacgacgtaacgccattaacggttgtgcaagcctgggggcagcgattaatacagcggtaggtctggggctatacccggattacgcaacggctgtcgataacatggttcgcgtgaaagatatctttataccgattgagagcaatgccaaacgctacgacgcgatgaataaaggcattttcaaagacctaaccaaacatactgatgtgatcctgaaaaaaagctatgaagtgatgcatggggaattggggaatgtggatagcatccagagctggagcaatgcgtaagtgaggaaggccgggcgggaaactgcccggcctgaacatacctgaatggttatccccgctgacgcggggaacataagttcgacaacttaaaaaatgataacaagtccggtttatccccgctgatgcagggaacataataaaaactttaactagttcggtttatccctgtttttacaaggaatattaactacactcgatgtctttagaataaaagacaatacgaatcgcactttatcaattttcacttaaagtatgaactggatatctttattcataagaactattcatcaacagcgtatagaggcggttatgtaaaaccactcattagcctcaaaacaaagacaaacttccagatttattacttaaccaatgaataacaagcttaaaaaatatactgttattctaaagaaaaaattaacaggcattaattcaatattaaaaaaataatagattaaaatttcttaacgatttaagaatcatacaaataacactttgattaaatttaattttttgtatcgataattgtgaacctctctggcatggagaactattttgaacatgaggtgttacgtggatatgttgcttattacaagtactgctaatataaaaacttgagaaagagataacgggttatatggtggtttatccccgctggcgcggggaactcgacagaacggcctcagtagtctcgtcaggctccggtttatccccgctggcgcggggaacacctgttttcgcaaatctatggactattgctattcggtttatccccgctggcgcggggaacacgggcgcacggaatacaaagccgtgtatctgctcggtttatccccgctggcgcggggaacactggctctgcaacagcagcacccatgaccacgtcggtttatccccgctggcgcggggaacacgaaatgctggtgagcgttaatgccgcaaacacaggtttatccccgctggcgcggggaacacattacgcctttttgcgattgcccggtttttgccggtttatccccgctggcgcggggaacactctaaacataacctattattaattaatgattttttaagccagtcacaatctaccaactttatagtatcacacaaacaacacatccattatgttaaagagcacttaatccattgattaaaaaggtaaatatttaaaataactctatacaaactaaaatctaccaaactttaccgcaataattttcactccagcgaaaaattaatgccacagaatttgtagagaatgctaatgattagccctggatgggtaaaatggaggagttttcagaggcgacaaacaatataaatgagtagaagtctttacaggttccacccatttataacgcttataaatgtttaatcaggcaatatttagatatttatgtgtttgcatgctcaaacgccaattacgcgcaatgcaggtttcaatgcacaaacgtgtggcatcatccttttggctaatcggctgcagtgcaatgactcgcggtttatcatcggtcagcgttgccagtagttcatccagtgcttcaatatcgcgtacgcgccccactggatgcttgatttcgttggctcgctccagtgcctgactcaacacttcatagccgccgcgcatgttcagctttgggcttacggtaacccaggtattcggtgtgcagcgtacctcatgagtaccactggtttcgatctggcagctaaaaccgttcttttcgagcagatcagtcagtggcagcaaatcatgaatgcaaggctcaccacccgtaatcaccacatgccgcgcggtgtatccctggcgaccaatgacagccagcaaatcttcactgctcgcagccccccacttatcactctctttggtcttcgccagaatgctgaaaagggagacttcccgatcctcaagcttttcccaggtgtgtttggtgtcgcaccaggcacagccaaccgggcatccctgtaaacgaataaaaatggcgggaacgccggtaaagtaaccctcaccttgcagggtctggaacatctcgttaatcgggtactgcatagcattctctgtgaagtggataattgttaattattgcagatcctgccacaacaatcatgtcttattaacattctgttacaggcaggtttaaagaaaaatgcgaaacatatcgttaataattaaagggagtaacgtattatgtcagaagaaaataaagaaaatggatttaatcatgtcaaaacattcaccaaaattatatttattttttctgtattagtttttaatgataacgaatataaaattaccgatgccgccgtcaatttatttatccagatttaatgagaaatttataatgcgctatttcatactaatgttcactttcgtatgttcctttgttgcagcccaaccaactattgtcccacaattacagcaacaagttacggatcttacgagtagcttaaacagtcaagaaaagaaagaactgacgcacaagttagaatctattttcaataatacccaagtgcaaattgccgtattaattgttcccacaaccaaagacgagacaattgaacaatatgctacaagagtttttgacaattggcgtttaggagatgccaaacgtaatgatgggatactgatcgttgttgcctggagcgatcgcactgtccgcatccaggtaggttatgggctggaagaaaaggtaaccgatgctctggctggagatatcatccgtagcaacatgatacccgcatttaaacaacaaaaattagctaagggattagagctagctataaacgctttgaataaccaactcactagtcaacaccaatatccgactaatcctagtgaaagtgaaagtgcgtcttccagtgatcattattactttgctattttttgggtatttgcagtgatgttcttccctttctggttttttcatcaaggcagtaatttttgtcgcgcatgtaaaagtggagtctgtattagtgcaatctatcttttagatttattcctgttctccgataaaattttttccattgctgtattttccttcttttttactttcaccatatttatggtctttacctgtttatgtgtacttcagaaaagagcatctggtagaagttatcatagtgacaacagcggttccgctggaggcagtgatagcggcggatttagcggcgggggcggttcttctggaggtggcggcgcatccggccgctggtaactcaaccataaaaaatgccagcccggaggctggcatttttaaatcagataaagtcagtcttatgcctggcctttgatctctttacgaccgttgtacggtgctttttcgcccagagcttcttcgatacgaatcagctggttgtatttagcaacacggtcagaacggctcatagaaccagttttgatctggcctgcagcagtaccaacagccaggtcagcgatggtagcgtcttcagtttcgccagaacggtgagagataactgcagtgtagccagcatctttcgccatcttgattgcagccagagtttcggtcagagaaccgatctggttgaatttgatcaggatggagttagcgatacctttttcgataccttctttcaggatcttggtgttggttacgaacaggtcgtcaccaaccagctggattttgtcgcccagaactttggtctggtatgcgaaaccgtcccagtcagattcgtccagaccgtcttcgatagaaacgatcgggtactgtttggtcagttcttccaggaagtgagtgaattcttcagaggtgaacgctttgttgccttcgccagccagaacgtatttaccatctttgtagaattcagaagctgcgcagtccatcgccaaagtgatgtctttgcccagttcataaccagcagctttaacagcttcagcgataacagccagagcttcagcgttggaacccaggttcggcgcatagccaccttcgtcaccaacagcagtgttcatgcctttcgctttcagaacttttgccaggtgatggaaaacttcagaacccatgcggatggcttctttcacagttttcgcgccaaccggctgaatcatgaattcctggatatcaacgttgttgtcagcgtgctcaccaccgttgatgatgttcatcatcggaaccggcatagagtatttgcccggagtaccgttcagttcagcgatgtgctcgtacagcggcatacctttagcagctgcagcagctttggcgttagccagagatacagccaggattgcgttcgcgccgaatttggatttgttttcggtgccgtccaggtcgatcatgatcttgtcaatgccagcctgatctttagcatctttgccaatcagcgcctgagcgatcgggccgtttaccgcagcaacagctttggttacgcctttacccaggaaacgggatttgtcgccatcgcgcagttccagagcttcacgggaaccagtagaagcaccactcggagcagctgccataccgacgaaaccaccctccagatgtacttcggcttcaacagtcgggttaccacgggagtcgatgatttcacgaccgatgatttttacgattttggacattaggttttcctcaagtcactagttaaactgaaactccagacaaacaacgcgtacccagggtacgcgttgccgctctaacttttttacttacttcgcctgacgtttctggaactcgctggcggctttcacaaagcctgcaaacagcgggtgaccatcacgtggagtagaagtaaactccggatggaactggcaagccacgaaccacgggtgattcggaacttcgatgatctcgaccaactgatcatccccggaacggcccgcaacgcgcagacctgcatcttcaatctgtttcaacagcatgttgttgacttcgtaacggtgacgatgacgctcaacaattgtcggcgcattgtacagctggcgaaccaggctatcgtcaaccaactggcactgctgtgcgccgagacgcatggtaccgccgagatcgctcttctcgctacgaacttcaacgttgccgttttcatcgcgccactcggtaatcagcgccacaaccgggtacttacagtctggcacaaattccgtagagttggcgttctccatgttggcaacatggcgagcgtaatcaattaacgccacctgcatacccaggcaaatgcccagataaggaatattgttctcacgcgcaaaacgcgcggtcgtaatcatgccttctacgccacgatagccgaaaccgccaggtacgaggattgcgtccagacctttaaggatttcaacgccgcgcgtttcaacatcttgactatcgatcagtttgatgttgacgctgacacgattcttcagcccaccgtgtttcagtgcttcgatcacacttttataagcatccggcagttcaatgtacttgccgaccataccgatggtgacttcacttaccgggttcgcttcttcgaagataacctgttcccattcggacagattcgcttccgggcagtttaagctgaatcgtttacaaatataatcgtccagcccctgagatttcaacaggcccggaattttatagatggaatcgacgtctttcagagaaataaccgctttttccggaacattacagaacaatgcaatcttcgcacgttcgttcgccggaacagcgcgatcactacgacaaatcaggatgtcaggctggataccgatggagagcagctcttttacagagtgctgagtcggtttggttttgacttcaccagacgctgccatgtacggcaccagcgtcaggtgcataaacagagtgtgctcacggccaatttcaacagccatctggcgaatcgcttcgaggaacggcaaggattcgatatcacctactgtaccgccgatttctaccagtactacgtcatgaccttcgccaccttccagcacgcgctctttgattgcgttagtgatgtgcggaataacctgcacggttgcgccgaggtagtcaccgcggcgttctttacgcagaacgtcagagtagatacgacccgtggtgaagttgttgcggcggctcattttggtacgaatgaaacgctcgtagtgccccaggtccaggtcggtttcagcgccgtcttcagtaacgaacacttccccgtgttggattgggctcatagtacctggatcgacgttgatgtacggatccagtttcatgatggtcacattgaggccacgggcttcaagaatggctgcgagggaggctgcggcaatgcctttacccagagaggatacgaccccgccggtcacaaaaatatagttcgttgtcatgctgaacctgagaagttaggttgaaaagacgatggaataaccaagacgggaaagcagtatacccgaacatgacctgtgccacaaactttcattatccctcctcttcgccagcgcactattgaaatcaggagtgagaaaatagcccctttggggtaaatgtttttgacgcaaatcaagcgcttgtcatttaaaaaatgacacaaatggcgcttgaccgcgtaattcccttagagatcaatttcctgccgttttacctgttgccagacttcttccattgtttcgaggtcaacacctgtcatttccagtccacgcgcggcaacaatacgctccacttcgcgaaaacgacgctcgaatttttcgttcgctttttgcaatgcgatttctgctttcgtccctaaatggcgagccagattaaccgtggcaaacagcaggtcccccatttcctcctccagtttagcctggtcgacaacagcctgccgcgcttcgtacatcacctcgtcgatctcttcgtagactttatcgactaccggaccaagcgtcgtccaatcgaagccaacgttggcgcaacgtttctggattttttgcgcacgcattaaagccggtaaactacgaggaatatcgtccagcgcgctatgctgcgctttctgcgcgcgctcttcggttttgatttgctcccaacgggcaagcacttcactactgttttcggcagaactatcagcaaaaacatgcggatggcgacgctctaatttatcgctaatagcagcgcaaatatcattaaagtcaaagcgcccttcttcctgagccatttgcgcgtaaaacaccacctggaatagcagatcgcccagttcaccgcgaagatcgtcaaaatcttcacgggcgatggcgtccagcacttcgtaggtttcttcaagggtgtaaggcgcaatggtggcaaatgtctgctctttatcccacgggcagccgttttccggatcgcgcaggcgctgcataatagtgagcaaacggtcgatttgattcattgaattgtcctgaaaattgcgggtctgtcaggtggaaacctgtgaccagaatagaagtgagttagtaacattacccaatcagtacgttaattttggctttaatgagttgtaattcctctggggcaactgttcctttcttcgttgctcctcttgcccgccaggcgatactttttacctgatcagctaacgctacgccatcacgttcctgaccggataaaacaacttcgaacggatatcctttactttgcgttgtacaaggaacacacagacacatacctgttttgttgttgtacatgaaaggactcaggacaacagctggacgatgtccagcttgctcgctaccttttgtcgggtcaaaatcaacccaaatcagatcgcccatatcgggtacgtatcggcttaccattaccagacttccttatctttcggctctccccagtcgatattctcgtggaggttttccggcgtgatgtcgttgaccagttcagcaagcgtaaatacgggctctttacgcactggctcaataattaatttgccatccaccaggtcaatcttcacttcatcatcaatattcagattgagcgcctgcattaacgtagccgggatccgcaccgccggactatttccccaacgctttacgctactgtggatcataaccctttcctcaaaccgctatcatatgtagatacagtatatatcaatctacattgtagatacgagcaaatttcggcttaactcccgtgcaaccgacgcgcgtcgataacatccggcacctggttgagtttacccagcacgcgccccagcacttgcaggttgtaaatctcaatggtcatgtcgatggtcgccagttgctgtttggtgtcgctacggctggcaacgccaagcacgttcaccttctcgttggcgagaatggtcgtgatatcacgtaacaacccactacgatcattagctaccacgcggaccaccaggctatatccggcggagtagctctcaccccataccgcgtcaacaatgcgttctggcgcatgggagcgcagttccgccagttgttcgcaatcggcgcggtgtacactaataccgcgcccctgggtaatgaagccgacaatctcatctccaggaatcggctggcagcagcgcgcgatgtggtgcatcaggttgccaacaccttcgactaccacgcgaccgttatctttactgcggttttgcggcgtgtagcttttttgctgaagttgcttcagcgcggcggcgtcctgctcttcggcactcggcttattaaattggctttgcaggaagttcaccatctgattgagacggatatccccgccaccaatcgccgccagcaactcgtcgacatcattgaagttgtaacgcggcagcagatgtttttctgcttctttcaggctgatccccagatgttccagctcgtcgtcaaggatttgccgcccagccagaatgtttttgtcacggtcctgtttacggaaccaggcgtgaattttgctacgcccacggctggttgtgacgtaaccgaggtttgggtttaaccagtcacggctggggttcggctgtttctgggtgataatttcaatctggtcgcccatctgcagctggtaggtgaacggcacaatgcgcccgccaatttttgccccgatgcagcggtgtccgacatcactgtggatgtggtaagcgaagtccagcggcgtacttcccgcaggcaaatcaacgacatcacctttcggcgtaaagacgtacacccggtcgtcaaagacctgactacgtacttcgtcgagcatttcgccggaatcagccatctcttcctgccacgcaatcagtttacgcagccaggcaatccggtcttcatgtccgctacgtgcgccgccagcagccgcgccctctttatatttccagtgcgcagcaacacccaactctgcatcttcatgcatctgtttggtgcggatttggatctcaacggtttttccacccggccccagaaccacggtatgaatagactgataaccgtttggtttcgggttagcgacgtaatcgtcaaactcatccggcaggtggcgatagtgagtgtgcactatccccagtgcggcatagcaatcctgtaaacgctcggcgacaatacgtaccgcacgcacatcaaacagctcatcaaaggcgaggttctttttctgcattttacgccagatgctgtagatgtgtttcggacgaccatacacttccgctttaacgccttcagctttcatctcagcgcgcagatgaccaacgaactcttcgatgtagtgttcgcggtcgagacgccgttcatgcagcagtttggcaattcgtttgtattcggttggatggaggtaacggaagcagtaatcttccagttcccatttcagttgtccgattccgagacggttagccagcggtgcgtagatgttggtacactcttttgccgccagtacacgttcatcttccggcgcatcttttacttcgcgcagatgagcaatacgctccgccagtttgatgactacgcagcgaaaatcatcgaccatcgccaataacatccggcgaacgttatcgacctgttcggaggaaacagaatcagtgtgcgtcgctttcagctggcggatcgccgccatatcacgcacgccgtgaataaggttaacgacgctcttaccgacgctctcacgcagcacatcttcgctgactacgttggcatccgccagagggaaaagcagcgccgcccgcagcgtgtcaatgtccatacttaatgtgctgaggatctccaccatctcaacaccacgccacaataacagactggcatccggatgcccctgcgtctgttgcagacaatacgcccaggtttcggctaagcactcacagctcttctggctggtaatacccagacttgcgatccatttttccggatcaaattcaccagccttattgatatgtgcacttcttaccgcaaccatcgtcctctcctttagggaccagacctgccgaaatcggcaaatcgcaattatttaacgcggctgaaaagtaccatgctttccagatgtcccgtgtgtgggaacatatccagcatcgccagtcgcgcaatggtatatcctgcttttaataacgcttcgctatcccgagccagcgttgcagggttacaggatacataaactatacgaataggttccagttttataatttgctgcataacacctgcggcacctgctcgcgccgggtccagcaacactttatcgaagccgtttttcgcccacggctgctttgtgacatcttcttcaagattttcgtgataaaacgtcacattctgtaagccattaagacgcgcattctgctggcctttttccaccagcgccggaacaccttctacaccgaccacactggcagcttgtgtcgccaatggcagtgtaaagttgcccataccgcagaacagatccagtacgcgatcttcaggttgcacatccagccattccaacgcacgcgctaccattttttggttcacacccgcattgacctgaataaaatcgcgcgggctaaaagttaagcgcaacccgttactgtcataccagggcatctcaccagagacggtttcgagtatctcactatcgggggcgagatacagatccaggccttcagaatggctaaagcgttccagtttttcgcgatctgcgctacttagcggtgcggtatggcgcaaaatcatcagcgtgccgctggttgcctgtaccagttcaacatgaccaagatggcgcatagcttgtaagctgcccagacatgccctgactttgggcagcaatgcttcaagttggggcgctaaaatggggcattgtttgacgtcgacaatgtcactggagcccgctttgcgaaaccccatctgaagttgctgtgttttcggtaagtagttcagacttaaacgcgcgcgacggcgatagccccagggaacatcggcgatcacttcagagacatcgtgtttcattaatcgggcgagtgccgcacttttgcttcgctgctgtaaatccacgctggcgtgttgttgctgacagccaccgcatacgccaaaatgaggacagcgtggcgtttcgcgttccgggctatcgcttaaccggcgtacgactttagcgcgggcatactgttttttatcttcagtaacagtaacttccgcgttttcctgcggcaataatccggggataaatagcgttttgccgttatgtcgcgccacgccctgaccaaaagagtcgaggtcgttgacactaacggttatgatctgacgcgtcgtcgtgcgtcgttttgcagagtagaattgcgccattggcgagactttctcaatttaacagtgtgaccttaattgtcccataacggaactccatgaccaactacagcctgcgcgcacgcatgatgattctgatcctggcaccgaccgtccttattggtttattgctgagtatctttttcgtcgtgcatcgctataacgacttgcagcgtcaactggaagatgccggtgccagcattattgagccgcttgcagtttctactgaatatggcatgagcctgcaaaatcgcgaatctatcggtcagttaataagcgtactgcatcgtcgccattccgatattgttcgcgcgattagcgtttatgatgaaaataaccgactctttgtcacctccaattttcatcttgatcccagtagtatgcagctcggcagcaacgtgccgtttcctcgccagctcactgtcactcgtgacggcgatattatgatcctccgcacgccgattatttctgagagttactcccccgacgaaagccccagtagcgatgccaaaaatagtcaaaatatgttgggatatattgcgctggagctggatcttaaaagcgttcgcttgcagcaatataaagagatctttatttccagcgtgatgatgctgttttgtatcggtattgcgcttatttttggctggcgcttaatgcgcgatgtaaccggtccgattcgcaacatggtgaataccgtcgaccgcatccgtcgcgggcaactcgacagccgggtggaaggatttatgctcggcgagctggatatgctgaaaaacggtatcaacagcatggcaatgagcctggctgcttatcacgaagagatgcagcacaatatcgaccaggcgacgtccgatctgcgtgaaacgctggagcagatggaaattcagaacgttgagttagatctggcgaaaaagcgcgcccaggaagcggcgcgtattaaatccgagtttctggcaaatatgagtcacgagctgcgtacaccactgaatggtgttattggctttacccgcctgacgctgaaaacagaattaacaccaacgcagcgcgatcacctgaatacgattgaacgtagcgcaaataatttgctggcaattattaatgatgttctcgacttcagcaaactggaagcaggtaagctgattctggaaagtattccattcccactacgcagcacgctggatgaagtcgttactctgctggcacattcttctcacgataaagggttagaactgacgctcaatattaaaagcgacgtgcctgataacgtgatcggcgacccgctgcgattacagcaaatcatcactaacctggtggggaatgcaattaaattcaccgagaatggcaacattgatattctggtagaaaaacgtgcgctgagtaataccaaagtgcagattgaagtgcagattcgggataccggcattggtattcctgaacgcgatcaaagccgcttattccaggccttccgacaggctgatgccagtatttcccgccgtcatggtggcaccgggctggggctggtgattacacaaaaactggttaatgaaatgggcggcgatattagcttccatagccagccgaatcgcggtagtactttctggttccacattaatctcgatctgaacccgaacattattatcgaagggccatccacccagtgcctcgcaggtaagcgcctggcctatgtcgaaccaaactccgcagcagcgcaatgcacgctggatattttaagtgaaacgccgctggaagtggtttatagcccaacgttctccgcgctgcctcccgcgcattacgacatgatgttgttaggcatcgcggtgaccttccgcgagccgctaacaatgcaacatgagcgattagcgaaagcggtaagcatgaccgatttcctgatgctggcacttccttgccatgcacaagtcaatgctgaaaaactcaagcaagatggtatcggcgcgtgtctgctgaaaccattaacacctacacgcctgttgcctgccctgacggaattttgtcatcacaaacaaaacacgcttttgcctgtaaccgatgaaagtaagctggcaatgacagtcatggcggttgatgacaaccccgctaacctgaaacttatcggcgcattgctggaagatatggtgcaacatgtggaactttgcgatagcgggcatcaggcggttgaacgggcgaaacagatgccgttcgatttgatcttaatggatattcaaatgccggacatggatggcattcgggcctgcgaactcatccaccaactcccgcatcagcaacaaacgccggttatcgcggtaacggcgcatgcaatggccgggcaaaaagagaagctgcttggcgcagggatgagcgattatctggcgaaaccgattgaagaagagcgattgcataatttgttgttgcgctacaagcctggcagcggtatttcctctcgcgtcgtgacgcccgaagtcaacgaaattgtggtgaacccgaatgcgaccctcgactggcaactggcactacgccaggcagcaggaaaaaccgatttagcgcgcgatatgctgcaaatgttactcgatttcctgcctgaagttcgcaacaaagttgaggaacagctggttggagaaaacccggaaggcctggttgatttgattcataaactgcatggcagttgcggctatagcggtgtgccacgtatgaagaatctctgccaactgatcgaacaacagctacgtagcggtactaaagaagaagatttggaaccggagctgctggaactgttggacgagatggataatgtcgcgcgcgaagccagcaaaattctcgggtaatggatgtcttgtcgagtagcaatcggctttttatgacgctggtttcagattggtgacaaagtgcctgtgtttatgccggatgcggcgttaacgccttatccggcctacaaaaccaattaaattcaatgaattaaaaaatgatgtagacctgatacatagcacaacaggctattttgcgtttagcatcagtctcaaaccggctccagatagagccggttttggttttctgtcttaacgcaccatgcacgggcgcttgttatcgaacgtccagccaggaatcagatactgcattcccatcgcatcgtcacgcgcgccaagcccgtgtttctgatacagctcatgggctttcatcacttgatccatatcgatttctacacccagccccggtttttctggcacctgtaccagcccgcctttgatctcaaacggttctttggtcaggcgctgattgccttcctgccaaatccagtgcgtatcaatagcagtaattttacccggtgcagcggcggcaacatgggtaaacatcgccagggaaatatcgaagtggttgttagagtgactaccccaggtcaggccaaattcatggcacatttgcgccacacgtacgctaccttgcattgtccagaaatgcggatccgccagcgggatatcaacggattgcagggagagcgtatggcccatttgccgccagtcggtggcgatcatattggttgcagtcggtagacctgtcgcgcgacggaactctgccatcacttcacgcccggagaaaccttgctccgcaccacacggatcttctgcataagccaggctacctttcaggtatttaccgattttaatcgcttcgttcaggctccaggcaccgttaggatcgagcgtaatacgcgcctgcgggaagcgttgcgccagtgccacaatagactcggcctcttcttccccggccagtacaccgcccttcagtttgaaatcgttgaagccatatttttcatatgccgcttccgccaggcgcaccaccgcatccggcgtcatcgcttcttcatgacgcaggcgataccagtcgcaactgtcatccggctggctttgatacggcagcggcgtggctttgcgattaccgacgaagaacagataaccgagcatttcgacttcgctacgctgttgaccatcgcccagcaggcttgccacgtttacccccagatgctgccccagcagatccagcattgccgcttctatcccggtaactacatgaatagtggtacgtaggtcaaatgtctgcaaaccgcgcccaccagcatcacgatcggcaaaagtattacgcaccagcgtcagaacgtttttgtattcacccagcgttttacctaccaccagcggaatcgcatcttccagcgttttacggattttctcgccgccgggaatttcccctacgccagtgtgaccagaattatctttgataatcacaatattacgcgtaaagaacggtgcgtgtgcaccactcagattcatcagcatactgtcatgacccgccaccgggataacctgcatttcagtaacaacaggcgtcgtaaattgagaactcatatttatgtcctttttcagaatcaatgacggccgaaaacgggacgtttacggtcaaaggtccagccggggatcaggcactgcatcggacctgcgtcgttacgcgcaccgccaggcagacgtttataggcctcatgtgccttttgtacctgttcccagtccagttccacgcccagaccgggcgcatcaggaacggcaatttttccgtttttaatctccagcggattttgggtcaggcgacaatcgccctcctgccaaatccagtgggtatcgatagcggtaggattacccggtgccgccgcgcccacatgggtaaacatcgccagagagatatcgaaatggttattagaatggcagccccaggtcagcccccagtcgtcgcaaagctgcgccacacggactgcaccggaaagcgtccagaagtgcggatcggcaagtggaatatctaccgcattgagcatcaccgcatgacccatttcgcgccagttggtggcgatcatgttagtcgcgacgggcaagccggtcgcccgtcgaaattccgccatcacttcacgtccggagaagccctgttctgcgccgcatggatcttcggcataggtaagaacatcattcagccctttgcataaagaaatggcttcatcaagcagccatgcaccgttgggatcaacggtaatccgcgcatccgggaagcgtttcttcaatgcacgaacagtgtcgatttcttgctcgccaggtaacacgccgcccttaagtttgaaatctttaaagccgtagcgatcctgactggcttccgccagacgcacaacggcttcgctgttcattgctttctgatgccgcaactgataccactcatggttgcccggcgtattttccacataaggaagatcggttttggtccgatcaccgatataaaacagataaccgaggacggtaatagcctcgcgttgcttgcctggccctaacagttcgcagaccggaacattcagcgccttacctagcaggtcaagcaaagcggcttccagcgccgccacggcgttaacgcgtaattcaaaggtccaggcacctttaccgaaggtatcaaaatcggcggcctgattacctttatgcacctgctggaccactttattcagtcgcgcaacttcctggcccagaaccatcggaatagcatcgacaagcgtctgataaatcacatctccgcccggcgcttcaccaatgccggtatgcccggcgttatcggtgagtaccacaatattgcgggtgaaatatgcgttatgtgccccaccaatattaagcaacatgctgtcatgcccggccaccggaatgactttcatatcagtaataacaggactggattgtgtcgccatcttattgccccgcaacaggtttcaactcgatacgcttgatatcgcccaccagcaccaggtagctcagtaccgcgattaaggcatgaacaccaacataaatcagcgccccattaaagctgccagtcgtgccaacgatataaccaattgcgattggcgtgacgatgccagaaatgttaccgaacatgttgaacaggccaccggaaagaccgctgatctcttttggcgcggtatctgccattactgcccaacccagcgccccgatgcccttaccgaagaaggccagcgccataaagccgatgatcatccactcaacgttgacgtagttgcagaacaccatcaccatgctcagcaacatgcccattacgatcggtgttttacgcgcaatgttcaggcttcccgtgcggcgcatcagccagtcggaaataatcccacccagcacaccgccgataaaaccgcaaaccgccggaacggaagccacaaagcccgctttcagaatgctcatcccgcgtgcctgcaccagataaaccgggaaccaggtaataaagaagtaagtcagggcgttgatacagtactgaccgatataaacgccgatcatcatccgactccctagcagctgtttgatctgcccccacttcacgctgaacggcactttaactttggtgttttgctgatccatattgatcagcgcaccacccgcggcgatgtactccagctctttcttatttacccccggatgttgatttggctcgtggatgactttcaaccagataaagctgatgacaatccccagaccgcccataaagaagaagacgtgactccagcccacttcatgcgtcagccagcccataatcggcgcgaagatcaccgttgcgaagtattgagcggagttaaaaatgctcaccgccgttcccctttcctgcgccggaaaccaggccgcaacaatgcgactgttgccggggaaagatggcgcttcagcaagcccgaccaggaagcgcagcgtaaacagggcaacgataatgccgaatccactaaagatatcgacgaagccttgcagcaaggtaaacatgctccagataaagatgctccagaagtagacgcgtttactaccaaaacggtccagcaaccagccaccagggatctgcccgataacataagcccaactgaaagcagagaacacatagcccattcccacgggatcaaggccgatatctttggccatttcgctaccggcgatagagagcgtagcgcggtcgccgtagttgaaggatgtgacgataaacaacatcaccactatccagtaacgagcatttgtgcgtttttccacactgctcgcagcctgacttaaagaactcattgttgcactcctgaaaattcgcgttagccacgctcactctggactgcgacatcgccaggaaatcagaggtgacgtagggtgttttttgccgtttttataggtcgttcgccgaatacggcgcgtgtttatatctggcaatagcagtataaaaagcgcgccatagcggctcaccgtgcaacaacacaacattaatgcgttcaatgaggcccgattttggcattagccctggacggtggaatccacttcacggaaatgaaaacaagaacaagaaaggaagggttaaaacgaagaaataaagaagagtatgaaatggatcgcttgactccaggcaaacgccagtaaaaatccgcgctatgaagcagtttttactggcatttgcctgaaaagattcgattcagcaccgctaaaacgacatttaccgctcgctgaacatatcaggacaacagcgtgccccactgttcgacccacggattactttccgtttccggttccgggttctcactggcgtcaatcaacagcatttcgccaacccgctgagcgctctgttcctgcaacaaggcatcgaactgtttgccgccattgcagaaattcacataactactgtcgccgagcgcaatcacgccataacgcagattcggctggaagcccagactatctttgattccctgaaagagtggcacaatgctatcaggaaggtcgccctgcccggtcgtggacgtaaccaccagaacatacttatcctgatagggcagccagtcgcttaattcaggatcttcaaataccgttgctttgtggccctgcgcggtcagaatcgcttccgcttcttcggccactaacagactattcccgtacatggtgccgacaaaaataccaatttccgccataccgttttctccctggattaggaacttatctctccatcctgaccgcttggcgcactgaactcaaccctttcattttcaggaagcagaccgcgccagccaaattgacttaacgcctgcatccaggtgtcgtccaggcccgcgtgaatagtcagcggctcgccagtaaaaggatgcgtcaaactcaactgactggcatgtagcattaaccgctggaggccaaaatgctcagcaccgctgcgattctggcgtaaatcgccatgtttgctatcgccaataatcggatgacgcaaatgggcaagatgtcggcgaagctgatgtttgcgtccggttttcggctccagttccaccaggccgtagcgcgtggtcgggtaacgtccggtcgctaccggcatttctacggtcgccagaccgcgataatgcgtcactgctggctgcgggcctttatcttcgcgggcaaatttatcagcgattttgtccagttcttccaccagtggataatccagcaccgcttcttccatcaaccagccgcgcacaatcgcatggtaacgtttctggatttggtgctgttcaaactgttgtgccagcagccgtccggcctcgctggataatcccatcaacaacacaccagaagtgggtcggtccagacgatgagcagtaaaaacatgctggcctatctggtcacgcacggtttgcatgaccactactttctcgtcgcgatccagccagctgcggtgaaccagccagccggagggtttatttaccgcaaccagccattcatcctgatagagtatttccagcattagctcgcatcatccgcaaaaagagcatccagtttttccagctcagccagaataagcgcgcgttgcggatggtccgtcgccagcgccatttcataatagggtgcaacggcaaaagcgcccggtaacggctgtttgttatctaacaaatcgtgcattcgcgggatcagcacccactgcaaccactccagtggttccatggtgtccataaagaacggttgggtactattaaattgatgcggctggggttcatcgtttcgccagtgctgatgttcacgcagtaacgcttcaagcgcctgcaactggagacgaacgcggtcatgagtggtcataaagcaacctcaataagaaaaactgccgcgaaggatagcaggaataaaaaaagggagcactgtattcacagcgctcccggttcgtttcgcagcattccagctacttttgttgctccctgctcatccttgacaacttttcctctggccttgcggccaatcgttcatcctgaactattgcttcctgctcacaccaccccgatgtgatacttcatcctgaagtgtccctggccttcctgacccaccgaatcatcctgaccggttctcattctccatcctggaggtgtcctttaacgcgtcctgcgtcatcctcttcgcttcatccagaagcctttccctgaaacaccatcctggtgtgtcctgcagaagtgtcatcatcctgatgttcacttcgttgtctgactccctgtcgacgaagatagaatcgtctttttcgcgaagtcttacaaggcgcttacagacaatgccttaaggaaaatttcatatgaaagttaagaattaacaatcaacattttgattttaaatgaaaataacgattcttatctttttaagtattcgcttatttcctggcgatctcctacagagtctgtaagagatctctcacaaccagatggggtatttggattacagaagaggcttaagttgattaaggaattccgcaagattactggctaaatgcgtccgtttacgtgttcccagcgtctctttgcacacttcaccggagagattacacacgctgatgacctctaactcttcttccagcgtcgcgataaatagtgtgggcggcagttttagccttttctgagtcaccagatgaccaatcagattttcctgcacccgacggaagtcgtcttcactccaggtttgcagcaatgtcagtttgatatcgccaaactgcgcgtgcatatccccggcaaactgagtcgtataaaaggtatgaattgtgggttgtatcacaatatcaaaagcgcgttcaaccgcgtttacattttgttccccggtaaacggctggggttgccagtatacggcatcttcggtagtactaataatgcacggactaggaacaccgtacagttcctcacttaacggccagcttttatgctcttcatgccacgcatcgcagtagcgtgcagtaaaatctttcagggcttgtgcggtcaaatcgtccactaatttctctcttcacttaaaccagatacacttgtcgtttagtttatctggtttatgacggtgaaacatgtcttcttatgcaaaccatcaggcacttgcgggcctgactcttggaaaaagtaccgattaccgggatacctatgacgccagcctactgcaaggcgttccacgcagcctgaatcgcgacccgctgggtctgaaagcggataacctgccttttcacggtacggatatctggacgctgtatgaactttcctggctgaatgcgaaaggtttgccgcaggtcgctgtcggtcatgttgaacttgattacaccagcgtaaatctgattgagagcaagagttttaagctctatctcaacagttttaaccagacgcgttttaataactgggatgaggtgcgccagacgctggagcgcgacttaagcacttgcgctcagggtaagattagcgtggcgttatatcgtcttgatgaactggaaggccagccgataggtcattttaatggcacttgcattgatgaccaggatatcactatcgataactatgaattcactactgactatctggagaatgccacctgtggtgaaaaagtagtggaagagacgcttgtcagccacctgctgaaaagtaactgcctgatcacccatcaaccagattggggtagcctccaaattcagtatcgtggacgccaaattgacagagaaaaactgctgcgttacctggtcagtttccgtcatcacaacgagttccacgaacagtgcgtggaacgcatctttaatgacctgttacgcttctgccagccagaaaaattgagcgtttacgcacgttatacccgtcgtggcggtctggacattaacccgtggcgcagtaatagcgattttgtcccaagcaccacaagactggttcggcaataaatttttctcaattttgcgtgctggattcacgcagaaggttgtgaaaggtcatcaggcagggctattgtaatcaaagggaatgacgatattcgtcccataaggagtttttcttgattacacatattagcccgcttggctccatggatatgttgagccagctggaagtggatatgcttaaacgcaccgccagcagcgacctctatcaactgtttcgcaactgtagtcttgccgtactgaactccggtagtttgaccgataacagcaaagaattgctgtctcgttttgaaaatttcgatattaacgtcttgcgccgtgaacgcggcgtaaagctggaactgattaatcccccggaagaggcttttgtcgatgggcgaattattcgcgctttgcaggccaacttgttcgcggtcctgcgtgacattctcttcgtttacgggcaaatccataacaccgttcgttttcccaacctgaatctcgacaactccgtccacatcactaacctggtcttttccatcttgcgtaacgctcgcgcgctgcatgtgggtgaagcgccaaatatggtggtctgctggggcggtcacagtattaacgaaaacgagtatttgtatgcccgtcgcgtcggaaaccagctgggcctgcgtgagctgaatatctgcaccggctgtggtccgggagcgatggaagcgccgatgaaaggtgctgcggtcggacacgcgcagcagcgttacaaagacagtcgttttattggtatgacagagccgagcattatcgccgctgaaccgcctaacccgctggtcaacgaattgatcatcatgccagatatcgaaaaacgtctggaagcgtttgtccgtatcgctcacggtatcattatcttccctggcggtgtgggtacggcagaagagttgctctatttgctgggaattttaatgaacccggccaacaaagatcaggttttaccattgatcctcaccggcccgaaagagagcgccgactacttccgcgtactggacgagtttgtcgtgcatacgctgggtgaaaacgcgcgccgccattaccgcatcatcattgatgacgccgctgaagtcgctcgtcagatgaaaaaaagcatgccgctggtgaaagaaaatcgccgtgatacaggcgatgcctacagctttaactggagtatgcgcattgcgccagatttgcaaatgccgtttgagccgtctcacgagaatatggctaatctgaagctttacccggatcaacctgttgaagtgctggctgccgacctgcgccgtgcgttctccggtattgtggcgggtaacgtaaaagaagtcggtattcgcgccattgaagagtttggtccttacaaaatcaacggcgataaagagattatgcgtcgtatggacgacctgctacagggttttgttgcccagcatcgtatgaagttgccaggcagtgcctacatcccttgctacgaaatctgcacgtaatctccgctcccccggtgacgtttgttgccgggttttctcgtttttggtcacttactcatcaactcatttcatttgttatatgaatgtttctcaccaccctcacgcgacaaatatcatcacagttaatatgtcatacaatttatgttgcaacgcaaacgtttccctattttcataaaccgtattttatcgctatgaaaaagaaattatcgccatgattaactaaaagtattgattttttcagttcaacctacatatattgcgcgccccggaagaagtcagatgtcgtttaatgggcaaatattgcccttaaattctcttttacttttgatttacagagtaaagcgttgggataatctatcttccaagtagattattgtatttgagatcaagatcactgatagatacataacttgtgtgtatctttccgccctcaaattattacggcggtaaatgattaagccatcgccgatagacagatttcatttttacggtcaggcaccttcccgggctgaactggctaaaagctgaattatttgcattcctccaggagaaatagatggaaacgactcaaaccagcacgattgcgagcaaagactctcgtagtgcctggcgcaagacagacaccatgtggatgctgggcctttacggcacggcaatcggcgcgggcgtgctgttcctgccaatcaacgccggtgttggcggtatgatcccgctgatcatcatggctatccttgcgttcccgatgacgttttttgctcaccgcggcctgactcgcttcgtactgtctggtaaaaacccgggcgaagacatcaccgaggttgtagaagaacactttggtattggcgcaggtaaactgattaccctgctctacttcttcgctatctacccgatcctgctggtttatagcgtggcaatcaccaataccgttgaaagcttcatgtctcaccagctgggtatgacgccaccgccgcgtgcgattctgagcctgatcctgatcgtgggtatgatgaccatcgttcgcttcggtgagcagatgatcgttaaagcgatgagtattctggtattcccgtttgttggcgtactgatgctgctggctctgtacctgatcccgcagtggaacggcgctgcactggaaacgctgtctctggacactgcatctgcaaccggaaacggtctgtggatgaccctgtggctggcaattccggtaatggtgttcagcttcaaccactctccgatcatctcttctttcgccgttgcgaagcgtgaagagtacggcgatatggcagaacagaaatgcagcaagatcctggcattcgcacacatcatgatggtgctgaccgtaatgttcttcgtcttcagctgtgtactgagcctgactccggcagacctggctgcggctaaagagcagaacatcagcattctgtcttacctggctaaccactttaacgcaccggttatcgcgtggatggctccgattatcgcgattatcgctatcaccaaatccttcctcggtcactacctgggcgcacgtgaaggcttcaacggtatggtgattaaatctctgcgtggtaaaggtaagtctatcgaaatcaacaagctgaaccgtatcactgcgctgttcatgctggtaacgacctggattgttgccaccctgaacccgagcatcctgggtatgattgaaaccctgggcggtccaatcatcgcgatgatcctgttcctgatgccgatgtacgcaattcagaaagtaccggcaatgcgtaagtacagcggtcacatcagcaacgtattcgttgtcgtgatgggtctgattgcaatctccgcaatcttctactctctgttcagctaagtcctttcgcgccgctttcgggcggcgcttcctccgttttaacgcgatgtatttcctatgattagcgtattcgatattttcaaaatcggcattggcccttccagttctcataccgttggaccaatgaaagcgggtaaacaatttaccgacgatctgattgcccgtaacctgcttaaagacgtgacccgcgtggtggttgacgtgtacggcagcctctctctgaccggtaaaggccaccacactgatatcgccattattatgggcctggcgggtaacctgccggataccgtggatatcgattccatccccagttttattcaggatgtgaatactcatggtcgcctgatgctggcaaacggtcagcatgaagtggagttcccggttgatcagtgcatgaacttccacgccgacaacctttctctgcatgaaaacggtatgcgcattaccgcgctggcgggcgataaagtcgtttacagccagacttactactctattggcggtggctttatcgttgatgaagagcattttggccagcaggatagcgcaccggttgaagttccttatccgtacagtagtgcagccgatctgcaaaaacattgtcaggaaaccgggctgagtctctctggcctgatgatgaaaaacgagctggcgctgcacagcaaagaagagctggaacagcacctggcgaacgtctgggaagtcatgcgcggcggtattgagcgcggtatttccaccgaaggcgtgttgcctggcaaactgcgcgttccacgccgtgctgcggcactacgccggatgctggtcagccaggataaaaccaccactgacccgatggcggttgttgactggatcaacatgtttgcactggcagtgaacgaagagaacgctgctggcggtcgcgtggtgactgcgccgactaacggtgcgtgcgggattatcccggcagttctggcgtactacgacaagtttatccgcgaagtgaacgctaacagtctggctcgttacctgctggtagccagcgccattggttctctttataagatgaacgcgagcatttctggtgctgaagtgggttgccagggtgaagttggcgtggcgtgcagtatggcggcggctggtctggcagaactattaggcgcaagcccggcgcaggtgtgcatcgcggcggaaatcgccatggagcacaacctcggtctgacgtgtgacccggtcgccggacaggtacaggtgccatgcatcgagcgtaacgccattgcggcagtaaaagcggtgaacgccgcacgtatggcgctgcgccgtaccagcgagccgcgcgtctgcctcgataaagttatcgaaaccatgtacgaaacaggtaaagatatgaacgccaagtaccgcgaaacctctcgcggcggcctggcaatgaagatcgttgcctgcgattaatcgctctccaaaggcctcgttttgcgaggcctcttcccgatttctcatccagccgtagcctgttccggcatcgaatgttacccttatcgcctgatctttaagggggttatcgtggctgttcatttgcttattgtcgatgcactgaatcttattcgtcgcattcatgccgttcaggggagcccctgtgtcgaaacctgccagcatgcgctcgatcagctcattatgcacagccagccaacccacgcggtcgccgtttttgatgatgaaaaccgcagtagcggctggcgtcatcagcgtttaccagattacaaagcgggtcgaccgccaatgccggaagagttgcacgacgagatgcctgcattacgcgccgcctttgagcaacgcggcgtcccgtgctggagtaccagcggcaacgaagccgatgacttagccgccacgctggcggtcaaagtgacacaggccgggcatcaggcaacgattgttagcacagataaaggctactgtcagttacttagtccgacattacgtattcgtgattacttccagaaacgttggctggatgcgccatttatcgataaagaatttggcgttcaaccgcagcagttgcccgattactggggacttgcggggatcagcagtagtaaggtaccgggtgttgcgggaatcggaccaaaaagcgccacgcagctgctggtcgagtttcagagtctggaagggatatatgagaatctggatgcggttgccgaaaagtggcgcaaaaaattagaaacccataaagagatggcgtttctgtgccgcgatattgcccgcttacaaaccgatttgcatatcgacggcaatttacagcaattgcggttggtacggtaacggcgagccggatacgccgcaaacgtcgtatccggcattatcacatcagcgcatttaccaggcggtatggtaaagctctacaatatcctcaagcgttgcttcacgcgggttgccaccggtacaaacatcatccagtgccgcctgcgccagtgccggaatgtcttccttgcgtacaccaacatcacgcaaatgtggcggaataccgacatcacggttgagagcaaacaccgcttcaacagcggcattacgcgcctcttccaggctcataccttccactttcacgcccataacgcgcgcgatatcgcggtacttctcaccggtaaagtcagcgttataacgcatgacatgcggtaacaggatggcgttcgcaacaccgtgtggagtgttataaaacgcgcccagtggatgcgccataccatgcaccaaccctaacccaacattgctgaagcccatacccgcaacatactgcccgagcgccatttcttctccggcatccttatcaccagcaacgcttcctcgcagcgccccagcaatgatttcaatcgctttaatgtgcagtgcatcggttagcgcccacgcgccacgggtaatatacccctcaatagcatgagtgagcgcatcgacacccgtcgcagctttcagcgctggaggcataccatccatcatgtcagcgtcaataaacgccacctgcgggatatcatgcggatcaacgcaaacaaacttgcgccgtttctcttcgtcagtgatcacgtagttaatggtcacttctgccgcagtacctgctgtggtaggaattgccagaatcggtacactgggtttattggtcggggaaagcccttccaggctacgcacatcggcaaactccgggttgttgctgataatgccaatcgctttacaagtatcctgtggagaaccaccaccaatagcgatcaggtaatccgcgccgctattctggaatacaccgagcccttctttgacgacagtaattgttgggttgggcactacgccgtcgtaaatcgcccatgccagccctgcagcatccatcttatcggtcactttcgccaccacgccgcattgcaccagcgttttatcggtgacgatcagcgccttctgataaccacggcgtttcacctcatcggttaaagccccaacagcaccccgaccaaaccatgccgtttcgttcagaatcattctgttagccatcatccttctccttgttgctttacgaaattactcttcaattcgtaacccataggttttgaatttctccagcactacggcaatctcttcatcgctcagcactggcaccgggtccgtaatcgccagggtcgtcaggtaaagttgcgccagcacttcaacttcatgcgccagccataacgctttttccagattcacctcacaagcgataagcccatgatgttgtaacaaagttgccttacgatttttgagagccagcgcaacatgttcagaaagttcgcgtgttccaaaggtcgcataaggcgcgcaaggaatagaattaccgccagccgccgcaatcatgtagtgaatagcggggatgcttcggttaagaatggaaactgccgtgcaatgaacggcatgattgtgaacaaccgcgttggcatccggtctgctttgataggctgccatatggaaacgccattcgctactggggagctttccttcctcatgtttaccgttgccatcaataaagacaatatggctctccgtcagtttttcatatggaatgcctgtaggcgtaatcagcatcccatcctgataacgtacactgacgttccccgctgtcccctggttcagtcccaggcgggtcatttccaggcaagtgtcaataatctgacgagcaagtttatttcgttccattagctacctctctctgattcaaaacagggcaataatgttgttcctttcacactattgaattagccgtttaattacccaccatcttcttcctgattaacaagaaagaaattcacaagcttatattttgtgacctggttcaactaatcacagtaaataactgcaagttctctttttataaccccattaaaaatgaccgctcttaaaaatatttatcaaaacggtcatttttctattcctccaagcccggaatgaccgttttcggcacaaacaattaatacggtcatctgatttgtgttttttatgatttattttctgaaacgggcatgaaatttcgattattaaagtgatggtagtcacataaagtcaccttctagctaataagtgtgaccgccgtcatattacagagcgttttttatttgaaaatgaatccatgagttcatttcagacaggcaaatattcactgatatgaagcccgaactcgctggttttgcacttttgaaaacataaccgattacgtgcttaagcttctgaacctaagaggatgctatgggaaacacaagtatacaaacgcagagttaccgtgcggtagataaagatgcagggcaaagcagaagttacattattccattcgcgctgctgtgcagtctgttttttctttgggcggtagccaataaccttaacgacattttattacctcaattccagcaggcttttacgctgacaaatttccaggctggcctgatccaaagcgccttttactttggttatttcattatcccaatccctgctgggatattgatgaaaaaactcagttataaagcagggattattaccgggttatttttatatgccttgggtgctgcattattctggcccgccgcagaaataatgaactacaccttgtttttagttggcctatttattattgcagccggattaggttgtctggaaactgccgcaaacccttttgttacggtattagggccggaaagtagtggtcacttccgcttaaatcttgcgcaaacatttaacagctttggcgcaattatcgcggttgtctttgggcaaagtcttattttgtctaacgtgccacatcaaagccaagacattctcgataaaatgtctccagagcaattgagtgcgtataaacacagcctggtattaagcgtacagacaccttatatgatcatcgtggctatcgtgttactggtcgccctgctgatcatgctgacgaaattcccggcattgcagagtgataatcacagtgacgccaaacaaggaagcttctccgcaagcctttctcgcctggcgcgtattcgccactggcgctgggcggtattagcgcaattctgctatgtcggcgcacaaacggcctgctggagctatttgattcgctacgctgtagaagaaattccaggtatgactgcaggctttgccgctaactatttaaccggaaccatggtgtgcttctttattggtcgtttcaccggtacctggctcatcagtcgcttcgcaccacacaaagtcctggccgcctacgcattaatcgctatggcactgtgcctgatcagtgccttcgctggcggtcatgtgggcttaatagccctgactttatgcagcgcctttatgagcattcagtacccaacaatcttcagcctgggcattaagaatctcggccaggacaccaaatatggtagctccttcatcgttatgaccattattggcggcggtattgtcactccggtcatgggttttgtcagtgacgcggcgggcaacatccccactgctgaactgatccccgcactctgcttcgcggtcatctttatctttgcccgtttccgttctcaaacggcaactaactgaacatattttccgaataaagtgaggaatctgtaatgaaaaaaatcagcttaccgaaaattggtatccgcccggttattgacggtcgtcgcatgggtgttcgtgagagccttgaagaacaaacaatgaatatggcgaaagctacggccgcactgctgaccgagaaactgcgccatgcctgcggagctgccgtcgagtgtgtcatttccgatacctgtatcgcgggtatggctgaagccgctgcttgcgaagaaaaattcagcagtcagaatgtaggcctcaccattacggtaacgccttgctggtgctatggcagtgaaaccatcgacatggatccaacccgcccgaaggccatttggggctttaacggcactgaacgccccggcgctgtttacctggcagcggctctggcagctcacagccagaaaggcatcccagcattctccatttacggtcatgacgttcaggatgccgatgacacaagcattcctgccgatgttgaagaaaaactgctgcgctttgcccgcgccggtttggccgtcgccagcatgaaaggtaaaagctatctgagcctgggcggcgttagcatgggtatcgccggttccattgttgatcacaacttctttgaatcctggctgggaatgaaagtccaggcggtggatatgaccgaactgcgtcgccgtatcgatcagaagatttacgacgaagccgaattggaaatggcactggcctgggctgataaaaacttccgctatggcgaagatgaaaataacaaacagtatcaacgtaatgccgagcaaagccgcgcagttctgcgcgaaagtttactgatggcgatgtgtatccgcgacatgatgcaaggcaacagcaaactggccgatattggtcgcgtggaagaaagtcttggctacaacgccatcgctgcgggcttccaggggcaacgtcactggaccgatcaatatcccaatggtgacaccgccgaagcgatcctcaacagtagttttgactggaatggcgtgcgcgaaccctttgtcgtggcgaccgaaaacgacagtcttaacggcgtggcaatgctaatgggtcaccagctcaccggcaccgctcaggtatttgccgatgtgcgtacctactggagtccagaagcaattgagcgtgtaacggggcataaactggatggactggcagaacacggcatcatccatttgatcaactccggttctgctgcgctggacggttcctgtaaacaacgcgacagcgaaggtaacccgacgatgaagccacactgggaaatctctcagcaagaggctgacgcttgcctcgccgctaccgaatggtgcccggcgatccacgaatacttccgtggcggcggttactcttcccgcttccttaccgaaggcggcgtcccgttcaccatgactcgtgtcaacatcatcaaaggcctgggaccggtactgcaaatcgcggaaggctggagcgtggaattgccgaaggatgtgcatgacatcctcaacaaacgcaccaacagtacctggccaaccacctggtttgcaccgcgcctcaccggtaaagggccgtttacggatgtgtacagcgtaatggcgaactggggcgctaaccatggggttctgaccatcggccacgttggcgcagactttatcactctcgcctccatgctgcgtatcccggtatgtatgcacaacgttgaagagaccaaagtgtatcgtccttctgcctgggctgcgcacggcatggatattgaaggccaggattaccgcgcttgccagaactacggtccgttgtacaagcgttaatacattactccctgatgtgatgcccggtcgctccggctaccgggcctgaacaagcaagagtggttagccggataagcaatgttatccggctatattgcaggagcgattatgaaacaagaagttatcctggtactcgactgtggcgcgaccaatgtcagggccatcgcggttaatcggcagggcaaaattgttgcccgcgccagtacgcctaatgccagcgatatcgcgatggaaaacaacacctggcaccagtggtctttagacgccattttgcaacgctttgctgattgctgtcggcaaatcaatagtgaactgactgaatgccacatccgcggtatcgccgtcaccacctttggtgtggatggcgctctggtagataagcaaggcaatctgctctatccgattattagctggaaatgtccgcgaacagcagcggttatggacaatattgaacggttaatctccgcacagcggttgcaggctatttctggcgtcggagcctttagtttcaatacgttatataagttggtgtggttgaaagaaaatcatccacaactgctggaacgcgcgcacgcctggctctttattagcagcctgattaaccaccgtttaaccggcgaattcactactgatatcacgatggccggaaccagccagatgctggatatccagcaacgcgatttcagtccgcaaattttacaagccaccggtattccacgccgactcttccctcgtctggtggaagcgggtgaacagattggtacgctacagaacagcgccgcagcaatgctcggcttacccgttggcataccggtgatttccgcaggtcacgatacccagttcgccctttttggcgctggtgctgaacaaaatgaacccgtgctctcttccggtacatgggaaattttaatggttcgcagcgcccaggttgatactagcctgttaagtcagtacgccggttccacctgcgaactggatagccaggcagggttgtataacccaggtatgcaatggctggcatccggcgtgctggaatgggtgagaaaactgttctggacggctgaaacaccctggcaaatgttgattgaagaagctcgtctgatcgcgcctggcgcggatggcgtaaaaatgcagtgtgatttattgagctgtcagaacgctggctggcaaggagtgacgcttaataccacgcgggggcatttctatcgcgcggcgctggaagggttaactgcgcaattacagcgcaatctacagatgctggaaaaaatcgggcactttaaggcctctgaattattgttagtcggtggaggaagtcgcaacacattgtggaatcagattaaagccaatatgcttgatattccggtaaaagttctcgacgacgccgaaacgaccgtcgcaggagctgcgctgttcggttggtatggcgtaggggaatttaacagcccggaagaagcccgcgcacagattcattatcagtaccgttatttctacccgcaaactgaacctgaatttatagaggaagtgtgaaatgctgaaaacaattagcccgttaatttctcccgaactattgaaagtgctggcagagatgggacatggagatgaaattattttttccgatgctcactttcccgcccatagcatgggaccgcaggtgatccgcgctgatggcctgttggtgagcgacttgctccaggcgattatcccgttatttgaactggacagttatgcaccgccgctggtgatgatggcggcggtagaaggtgacactctcgatcctgaagtagaacgacgttaccgtaatgcgcttagtctacaagccccgtgtcctgacatcatccgcatcaatcgttttgcgttttatgaacgggcgcaaaaagcctttgcgatcgttatcacaggcgaacgagcgaagtacgggaatattcttttaaaaaaaggggtaacaccgtaatctcataccggtacgcccgcatgacgcgggcggttatcgaatgatggggtgaaaaatatgaaagcggcacgccagcaagcgatagtcgacctgctgctgaaccataccagcctgaccacggaagctctctctgaacagctaaaggtcagtaaagaaaccattcgtcgcgatctcaatgaattacagacgcagggtaaaattctgcgcaatcatggacgcgctaaatatatccaccgtcaaaatcaagacagtggcgatccctttcacatcaggctgaaaagccattatgcgcataaagcagatatcgcgcgcgaggcgctcgcgtggattgaagaagggatggtgatagccttagacgccagtagtacttgctggtatctggcacgccagttgcctgacatcaacattcaggtcttcaccaatagccatccgatttgccatgaactcggtaaacgcgaacgcattcaactgatcagttccggcggcacacttgagcgcaaatatggctgttacgtcaatcccagcctgatttcccaacttaaaagcctggaaatcgatctgtttattttttcttgtgaagggatcgatagcagcggcgcactgtgggactccaatgcgatcaacgctgattacaaaagcatgctattaaaacgtgccgcgcaaagcttgttattgattgataaaagtaaatttaatcgtagtggggaagcccgcatcgggcatctggatgaggtaacgcacattatttctgatgagcgccaggttgcaacttctttggtaacagcctgacggaaagggtagcaggccggagacgacgccccggccttgcctgttatcgctcgtcgcgacgaccacccaccgcagcccagatgcggcggacgtgcaccgtcacttcttcgcgatcgtgatacaactgccgcgcctgaatctgagcatttatgccatgttcatcaagctgtgcctgaatatacgccagattgtgactcacttcttcgtagcgttttttcatcggcagtttgaggttgaaaatggtttcacggcaccagccattaaccagccactgtgccatcaatgccgcaactttcgccggtttttcaaccatatcgcataccatccaggagatattgctgcgcgtcggacggaatttgaaaccgtcttcccgcagccacgtcacctgtccggtatccatcagactttgcgccatcgggccgttgtcgacggaataaacccacatgttgcgcttcaccagttggtaggtccagccgccagggcaagcgcctaaatccaccgcccacatcccgttcgccaggcgttcatcccactcatccgcaggaataaacacatgaaatgcctcttccagtttgagcgtggaacgactcggcgcatctgccggaaatttcaggcgcggaatgcccatatagaacgggctattattgttgctgtaactgtaaccggtatagcagcagcctggtgcaataaagaatacatgcacaaccggacgcttcggcgtttcatagttcgccagcaccccggcatcgcgcaaggcagcgcgtagcggaacagtaaatttacggcagaatttcagtaactctttgctttcgttggtatcggcaacttcaacacgcagttcaccgcccttctctactacgccctgtaacatgccgacaatgggggtaatacgatcttctggcggcaaatgctgcaggagttcccccaccacaaaccactggcgggcaaaaattaaactactgaacggcagctcacggattaacttatcgccatcatcaggttgataacattcataaatgacataacccgcattctctttcacgcgggcaaaaccgaaaatttcccgctggccggctttatcggtaatttctgcggcgcactctttttcaaagcccggacggcacagcaatacaaccttattcatgacttacgcccttgcgctttaaacggatagcaccaactaacattaacgcccagcccgcgaggaagctcacgccgccaaccggagtgacaaacgcccacaaacgcagatgggacagcgccaggcaataaaggctgccgctgaacaacaccgtgcctaacgcgaggaaaacgctactccagtaaaaccagatactgatgcgacgctgcattgccaccgccagacctaagatcgccagcgtatgaaacgcctggtattcgaggccggtctggatccagcccatctcaacggcccccatggttttacttaacacatgcgcgccaaaagcgcccagagccacaaaaatgaagccgctaatggcggcgaaaatcagcataaaacggctggtcatggtcgtaccctacgtaaattattgttcataacgaaagcggaatttttcttgttcagcagcggctttcgccaggatccattggcgaaaggcggctattttacccagttctgcctgactgtcatgacaaaccagataaaaagcatttttactgaccagaacatcattaaacgggcaaacaagacgtccggcctcgatttcagattgcgccatcacgttatttgccagcgccactccctgcccgtggatagccgcttgcagcaccatggcgctatggctaaaaattggcccttgctgaacgttgatatgatttaaccccaactgtcgggtatatgtctgccagtcacggcggctagcatcatgtaataacgtatgtttagccagatcttccggtgtcttcaagggtttttcgccagtcagcagtagcgggctacacaccggcaataaatattcggcgtacagtttttccacccgtagccccggccagttgccccgaccataaaatatcgccacatcaacatcatccgccagcttatcttcctgacgatcaaccgcctggattcgaacgtcaattcccggataagcactattaaagctggaaagtcgcggaaccaaccaatgaatggcgaaactggggagtaaactgaccgtcaacgcccccttggcgctacgggcctggagtttacgcgtcgcttcggttaattggctaaatatctctttgatatcgaggaaatagctttgcccttcctcggtcagcaggagactacgattacggcggcggaacagttttagccccaaaaaatcctcaagagacttgatttgatgacttactgcggcttgggtcacaaaaagctcttctgctgcgcgagtgaaacttaaatggcgtgctgcggcatcaaaaactcgtaaggcatttagcggtggtaatcgtttagacatggctattaaactttgatgttaaatgaatttaacaattagatcacactatgtaacctattagtttttttaatctgagccattataaattgtccgttgagcttctaccagcaaatacctatagtggcggcacttcctgagccggaacgaaaagttttatcggaatgcgtgttctggtgaacttttggcttacggttgtgatgttgtgttgttgtgtttgcaattggtctgcgattcagaccatggtagcaaagctaccttttttcacttcctgtacatttaccctgtctgtccatagtgattaatgtagcaccgcctaattgcggtgcttttttttaccttgcgatcgcgaattactgatccagttcgaccatctctttcacgtcagtacggttgatctgctgtttgttgccattagcgtctttatagctaatcataccggtatcgttatcagtctgtggtttgccgtcagagacgatggtacgtccgtcattggtgtgcatcacatagttgctaccggaacaggcgctcagggcaaaagtcagcatacaggcagaaataattgcggcagtctttttcatcatcttctccttaaagcgattaataaatcttaatagtattgattaacaggctaaaattaacgcctaacactattcagcatatgttacttacgcggcttcgccaggatatccagataattctgatggttagcactctccttgtatcaaagtgaattttgcgtcacgatcggtgcatcaagccgaggagtaccatgaacgtttttaatcccgcgcagtttcgcgcccagtttcccgcactacaggatgcgggcgtctatctcgacagcgccgcgaccgcgcttaaacctgaagccgtggttgaagccacccaacagttttacagtctgagcgccggaaacgtccatcgcagccagtttgccgaagcccaacgcctgaccgcgcgttatgaagctgcacgagagaaagtggcgcaattactgaatgcaccggatgataaaactatcgtctggacgcgcggcaccactgaatccatcaacatggtggcacaatgctatgcgcgtccgcgtctgcaaccgggcgatgagattattgtcagcgtggcagaacaccacgccaacctcgtcccctggctgatggtcgcccaacaaactggagccaaagtggtgaaattgccgcttaatgcgcagcgactgccggatgtcgatttgttgccagaactgattactccccgtagtcggattctggcgttgggtcagatgagcaacgttactggcggttgcccggatctggcgcgagcgattacctttgctcatagtgccgggatggtggtgatggttgatggtgctcagggggcagtgcatttccccgcggatgttcagcaactggatattgatttctatgcttttagtggtcacaaactgtatggcccgacaggtatcggcgtgctgtatggtaaaagtgaactgctggaggcgatgagcccctggctgggcggcggcaaaatggttcacgaagtgagttttgacggcttcacgactcaatctgcgccgtggaaactggaagctggaacgccaaatgtcgctggtgtcataggattaagcgcggcgctggaatggctggcagattacgatatcaaccaggccgaaagctggagccgtagcttagcaacgctggcggaagatgcgctggcgaaacgtcccggctttcgtagtttccgctgccaggattccagcctgctggcctttgattttgctggcgttcatcatagcgatatggtgacgctgctggcggagtacggtattgccctgcgggccgggcagcattgcgctcagccgctactggcagaattaggcgtaaccggcacactgcgcgcctcttttgcgccatataatacaaagagtgatgtggatgcgctggtgaatgccgttgaccgcgcgctggaattattggtggattaatgacaaacccgcaattcgccggacatccgttcggcacaaccgtaaccgcagaaacgttacgcaataccttcgcaccgttgacgcaatgggaagataaatatcgccagttgatcatgctggggaaacagcttccggcattgccagacgagttaaaagcgcaggctaaagagattgccggatgcgaaaaccgcgtctggctgggatatacagtggctgaaaacggcaaaatgcatttctttggcgacagcgaagggcgcattgtgcgcggcctgctggcggtgttgttgactgccgttgaggggaaaaccgccgccgagttgcaggcacagagtccactggcattgtttgatgagctgggattacgtgcgcagcttagcgccagtcgcagccaggggttaaatgcgttaagcgaggcgattatcgctgcgacgaagcaggtttaagcacagaaccgggtcggataagacgttcgcgtctcatccgacctgattgtttaaccctgacgcgccgctttcgccatcatcttcttcagcgcatgagaaaccgcaacaaacccaaaggtggcggtcaccatcgttgccgcgccaaatccagatgcacaatccatccgcttcggcccttctgccgtggctttcatcgcacacaccgtaccgtcactctgcgggtacaccagcgcttcagtagaaaacacgcaatccacgccgagcttacctttactgtttttcactacgccaaaatcgcttttcaggcgctcgcgcaacttcgccgccagcgggtcctgaatcgttttcgccagatcggtaacctgaatctgcgtcggatcaatctgcccacccgcgccaccggttgtgaccagtgggattttattgcgccgacaataagcaatcagcgccgctttgggccgtacactatcaatggcatcaatcacgtagctataacccacgctcatatactgcgctacgttatccggcgtcacgaaatcatccaccaccgttacacggcactccgggttaatctggcgaatacgctccgccataacttccgcttttgccagcccaacgttatcgcgcagggcatgaatttgccgattggtattggtgacgcacacatcatccatatcgataagcgtgattgcgccaatccccgtgcgcgccagcgcttccgccgcccaggaaccgacaccaccgataccaaccacacaaatatgcgcgtcagcaaacagttgcaacgctttttcaccatacagacgcgctgtgccaccaaaacgctgacgccatgcatcactaattaccacagacatagcacctcagaattaaaaagggcgaggttatccctcaccctaaacgcataaatgcctgatgcgctacgcttatcaggcctacataactcctgcaatattttggatttgcatgatttgtaggccggataaggcgttcacgccgcatccggcatgaacaacgcgcacttagtcaataatcaggatgtgaggttacccctcaccctgtcatatccgtaaaaacggcatacagaatatcacatcagccgctaaagacgttacctgcgcccggggcggttttcagcacccagacacgtccatagtggttgtaccaacctgcgcggtgtccggcttccggcccgatcccttgatagatatcgaagtgttggcctttgattgcaccaccgacatccagcgccaccatcagacgcagttcgtactgaccattaaatttgccgttattatccagcaacggcacttctgccagcaaggtagtacctggcggaataatggaacgatcagaggcaacactcgcgcgaccaaccagcggcaccgcacttgcccctttcaccggagcaaaagattgcggtttaaagaagacgaaagacgggttctgttccagcagctcgcgaacctcggcttcactgtgtgtttcgccccagtgacgaatcgcctgcatgctcatatcttcttttttcacttcgccacggtcgatcagcaccttaccaatgctgcgataggcatgaccgtttttccctgcatagctgaaaaagttaagcggactgccatcaccaaagtcgatatacccactaccctgcacatccataatgaagttatccatcagggagttactgtaagcgagaatatatttatcactcaatgcccccgcgtagatctccgcacgagacggcagacgaccacgttttggcggcatacggtaaataggatactggaactcgccctggcgggtatggcgcgcctgaattaccggcgtgtaataaccggtaaactgcacgttaccatagttgtcggcaccttccatctgccaggcatcaatgccgaactggcgcatattgcgggtatcaccgcctgcgcgcagccactcttgcaccgcgttataaacattactctggttgccatacagacgcggactgctattacggatatggttaatttgctcggcaaaatcaccggcgttaatcggcgcgccaacggcatctggctggttcaccagagagaaaggctgggtaaatttcccgtctttatattgctgtccgcgatcggttggtttggaagagcaggcggcaagcattgccacaaccgtgcccataagaaggtactttacccaacgtcctttcattgttctcttcttcaggttaaaaaataaggcgcaacgaagataacaaaccgccgcgtttaatgaaatgagcagcctctccctgacgcaaattttgcacaaaaaataggctttagtgatttgtttttgttcaaaatcatgccaaatccgtgatcggggtaaaaaaaaggttgcatgaaaacgcgagcggagtatagtgcgcatccacggacgcggggtggagcagcctggtagctcgtcgggctcataacccgaaggtcgtcggttcaaatccggcccccgcaaccaattaaaatttgatgaagtaaagcagtacggtgacgcggggtggagcagcctggtagctcgtcgggctcataacccgaaggtcgtcggttcaaatccggcccccgcaaccaatcaaatttgatgaagtaaaagcagtacggtgacgcggggtggagcagcctggtagctcgtcgggctcataacccgaaggtcgtcggttcaaatccggcccccgcaaccaattattgaacaccctaacgggtgtttttttgtttctggtctcccataaaaaagcgccattcagcgcctttttatcatccccttctcgccagcgtcgccccatcggcaaaatacgctttaatccccgcaagaatagactccgcaacttcctgctggaaagtcgccgttttcagtttacgctcttcctcaacgttactgataaacgccgtttcgaccagaatggagggaatatctggtgcctttagtacggcaaacccggcctgttcaacttgatttttatgcagcttattgattttaccgagcttattcagtaccgctttaccaaacttcaggctgtcggcaatggtcaggctctgtaccatatcgaacatggtgtggtcgacatagcggtcaccgcttttgctcacgccaccaatcaagtcgctggcgttctgggtttgtgccagatattttgccgcagtactggttgcacctttggtactgagcgcaaacacagaggaaccgctcggctgacgactggtaaaggcgtcggcatggatagagacaaacaggtcagcacgctgtttctgggcttttgctacgcgcacttgcaatggaatgaagatgtcttcattgcgcgtcatgtacaccttcatattgccctctttctcgatcagagagcgcaaacggcgagctatttgcaataccacatctttttcgcgcgttttgtatttccccaccgcaccggagtcttcgccaccgtggccagggtcaagcataatgacaatcggacgatcgcgccctgctttacccggttgtggaccactttgcgctggcggcacctgcttttcgaggtcgcctttgttgtaatcctccagcagcgccagcagcgggtcctgcatatcctgtgcattggccggatagaggtccatcaccagacgctctttaaacccggcgaccggcgcaagggcaaacagctgcggttttacgttttgctttaattcaaaaaccatccgtacggtttgcgggtcaaattgcccgacgcgcgcgctcttgatgaacgggtcgtctgcacgaatttgtgccgccatccccttgagtacgctgttcaggtttacatcttcgatatccaccaccacgcgttcagggttactcaacgcgaactgcttatatttcagctgacgattactttccaccgtcacgcgggtgtagctggacgcaggccagacgcgcaccgccacgacctggctgaccgcagccagactgacctgacttacgctcaatagccacatggcacccgcgccttgcagtaaacgacgacggctgattgcagtgttggatccactcatgcctctcccgagcaaaagaaatctaagctgtgtaacaagtaaacgactaatttgaccggaaactttagcgaaagacgcataatctgtcatctaataaacggtaaacattctttttatattcacggcattactgataaaaaagtcgctctcgcataaaatttacacttgcaccctgcgaaaaaacagaataaaaatacactaatttcgaataatcatgcaaagaggtgtgccgtggtaaaggaacgtaaaaccgagttggtcgagggattccgccatagcgttccctatatcaatacccaccggggaaaaacgtttgtcatcatgctcggcggtgaagccattgagcatgagaatttctccagtatcgttaatgatatcgggttgttgcacagcctcggcatccgtctggtggtggtctatggcgcacgtccgcagatcgacgcaaatctggctgcgcatcaccacgaaccgctgtatcacaagaatatacgtgtgaccgacgccaaaacactggaactggtgaagcaggctgcgggaacattgcaactggatattactgctcgcctgagcatgagtctcaataacacgccgctgcagggcgcgcatatcaacgtcgtcagtggcaattttattattgcccagccgctgggcgtcgatgacggcgtggattactgccatagcgggcgtatccggcggattgatgaagacgcgatccatcgtcaactggacagcggtgcaatagtgctaatggggccggtcgctgttagtgtcactggcgagagctttaacctgaccagcgaagagattgccactcaactggccatcaaactgaaagctgaaaagatgattggtttttgctcttcccagggcgtcactaatgacgacggtgatattgtctccgaacttttccctaacgaagcgcaagcgcgggtagaagcccaggaagagaaaggcgattacaactccggtacggtgcgctttttgcgtggcgcagtgaaagcctgccgcagcggcgtgcgtcgctgtcatttaatcagttatcaggaagatggcgcgctgttgcaagagttgttcagtcgcgacggtatcggtacgcagattgtgatggaaagcgccgagcagattcgtcgcgcaacaatcaacgatattggcggtattctggagttgattcgcccactggagcagcaaggtattctggtacgccgttctcgcgagcagctggagatggaaatcgacaaattcaccattattcagcgcgataacacgactattgcctgcgccgcgctctatccgttcccggaagagaagattggggaaatggcctgtgtggcagttcacccggattaccgcagtagtagtaggggtgaagttctgctggaacgcattgccgctcaggcgaagcagagcggcttaagcaaattgtttgtgctgaccacgcgcagtattcactggttccaggaacgtggatttaccccagtggatattgatttactgcccgagagcaaaaagcagttgtacaactaccagcgtaaatccaaagtgttgatggcggatttagggtaagcgatgaaaatcgtcggatgcgacatgcgtaacactcgtacgtcgcatccggcaattacgtttattcccgactactaaacaacgccgccagaccactgcgccgctcagtacgagtggcgattgccgcacttaatatgcgctcatcggcatacaggctcagacggcgacgcgcgcgggtcaccgcggtataaaccagctctcgcgttactaccggcgtgcgttggctcggcaaaatcaacgccgcatggtcgaactcgcttccctggcttttatgtaccgtcatcgcccacgtagtttcgtgctctggcaagcgactcggttgcacagacttaatattgccgtccggcatcgcaaaccagacgcgcgtcccctgcccgcgatccagcgcaataccgatatcgccattaaacaacccaagcgcgctgtcattacgggcaatcatcaccggtcgaccttcgtaccaacgagagtgcggatgacgatgaattttgcgcttctgttgcataaactgctcaattcgctcattcagtccagccacgccaaacggcccttcccgcagggcgcacaaaagctggtactcattgaacgcctgaatgattaaatccggctcggcacgcgcttgcagcagatccagataacgtccgtaacccgcaagagcttcctcaagcatcgcaatataatcttcgccgctctgtaaaagccgtttttcgatatcagtaaaatcctgctgaaaaacggttttcactgccgttttatcaccacggttgatcgccgcagctaactgaccaatgccagaatcgctgccgaaacgatagcttttttgcagcaggcagagactgtcgcgcaaagatgccgcttctgtgccggttcctgccggaacgtgagtccccgtcaggcggcttagctgcctggcacgctcggcggtaaagcccgcgttggcataagcgcagatatcgcccagcacagccccagcctcaacgctggccagttgatcacgatcgccgagaaagatcactcgcgcatgatcgggcaaggcgtcgatcagtctgctcatcataggcagatcgatcatactcgcttcatctaccaccagcacatcaagatgcagcgggttaccggcatgatgacgtaaacgctggctacccggctgcgcgcccagcaatcggtgcaaagtgctggtatcttccggaatgcgtttcttttgttcatcggtcagcggtaactgtcgcaaagccttgccgagagattcggttaagcgcgcggcagctttacccgttggtgcagccagacggatacggcagcgttcgccgtcggccatttgaattaacgctgccagcaacttcgctacggtggtcgttttaccggtgccagggccgccggaaatcacgctgatccgccgcgtcagcgccactgccgccgcaactttttgccagttaatttcatcgcttactggaaaaagtttgtccagggtttgcgccagtagagcttcatcaacctcaatggcatgattcacttcgttgaaaaagcgtgccactgtgcgctcgttacaccacatgcgattcaaataaagacgatcgccacagaggatcatcggcgtgggttcatctcccctgctgaccgcttgagaagccagcaagcattcttcccaattttgtagctcaccgatttcactgacacaggtcgccaacagcggatggctcgcctcgttattttccagtcgactaagcggcaaacaaacgtgtccctctccggcatcatgacttaacagtgccgccgcgagggtgacggcaggatgttcatctcccgccacggtcagggcaaattgcacatccagcgggcgtagctgtttgtgctccacagcttccagtaattgcttttgcaatttcattacgcctcctccagggtcataccggcaaacatctcatccatcagggcaatcaacccggcgttgggtcgggttgtgtaaatcccctgttgcggatgttctttatcaacgccacgcaggaacagataaataacgccgccaaagtggtgctcatagtcgtaatcagcaatgcgatggcgcagataacgatgcagcgccagggtataaagctgatattgcagatcatagcggtgtgcctgcattgccgctgccatagcctgttgggtgtaagcgctactgtcttcacccaaccagttggatttatagtcgagcaggtaataacgcccttcgtggcggaacaccaggtcgataaagccttttaacatgccacgtacctgcatgaactccagcggcgggcagcctgcggatagcgggtcaaactggcggattaacgtatcaagctgactggcgataagcggttcactaatcggcagataaaactccatctccacctgtttattgcgggcggaaagttgactcaggcttacgccggtttcattgagaggtgcctggaggacagccgtgatccactcggtcaataccggttcccactggctttcaaagccgccgagttccagtttttcccgcacccagttcgggtcaaccggctgggtaaaatccaggtcttcaaacaaactgtgcaagaacgtccccggactcgcaccgcgcggaaactgatgtggtgttaacgtcggttcttcaacgacgctggcaacgcctgcagcatcgacatccagccgaggcatcaaatcctgggcgataccgtgaccacgctgttgcaaaccagagtagctggtgacgcgccagttatcgccgggcaatcgttgtaacgtcttcgcattcagctctgctgtagaaacatcattaacctgccagggttggttatcaccagtttgtgccgtttgccaggcaatatcatcatcgcataacgcttcaatacaggtgcgaagccctgccgcatcttgcggttcccctttttgcagcaaacgcccgagcgcactttggtggacgtcggtgtcaccttttttatcgccacgacggcgcaccagcggtgcaacgccgagactgcaatgccaaacgctacgtgtcagcgccacgtaaagcaaacgcagatcttccgccagacgttcggcctccgcgaggtcgacgctttctggcgcagcattaagatccagaactgcctcaaagctgtggcgatcgtgataaaacgcctgctcctggacgcggaaattggtgataaacggcagccagaccaatggatattccagccctttgcttttgtggatcgtgacaatctgcaccagatgtttatcactttcgagacgcatttgttggctggaggcattactgtctggctcgaggatatgttggcttaaccagcgtaccagcgcatgttcactttccagctgcgttccggcttcttgtagcagttcgctgatatgcaagatatcggtaagacgccgctcaccgcctgccgttgccagcaagttttcagcaatgttacgcgcgctcatcagcgcccgcagcatcggcataacgccacgtttgcgccagatttgccgataaccatcgaactcttcgactaccacatcccacgcatgttcgtcattgttcagcgtttcgatatccagcgcgttcagccccatcatactcgttgccagcgcactacgcagggtgttctcacgttcgggcgtcatcaccgcctgcaacaaccaaagcatttcctgcgcttccagagtttcaaaaacactgtcgcggttgctaaggtaaacggaagggatttccagcaacgttaaggcatcgcgcacctgggcggcctcctggcggctgcgcaccagcacactgatgtcgctagcacgcaccggacgcgcgtcgtcgccgttcatcagcaacgcttcgccccgctgtccggcttgtagccagtcgcggatttgcgcagcacatacctgcgccatggtactttgataatcgccaacgccgcagctttcgccttccatcagccacattttcatcgcaggctgtgtttcacctttaaatacaaaacgtaacgcctgatttttcccggcacttttcactggaataaacggtatttcgcgaaacatgaacgcgtcatcagtctggctgaaaagcttattcacgctgttcaccattcctggtgcggaacgccagttggtgtctaaagtgtagtgggcgtgaacttcgctacgcgccttcatataagtgaagatatccgcaccccggaatgcatatatggcctgcttcgggtcgccaattagcaacaatgcggtttccggctgatggtgccagatacggcgaaaaattcggtactgctgggggtcggtatcctgaaattcatcgatcattgccaccgggaatcgcgtacggatcgccgctgccaacacctcaccgctttcgctacgcagcgcggaatcgagccgacttaacatgtcatcaaaacccaattcgccacggcggcgtttttcacgcgctactgtttcgcggatctcagccaatgcgcgggtgatcaccagatcgcggatgctcaatggttctgcaagcagttgatcgatcgcctcaaacagtggatgtcgcggggtttcccccccggccttcgtgcgatcttctaagaaacgctgggagaatttttccaggctctccggcaactgataactgtttgtctcttcttctgcccaggcgctgatcttgtcgatccatttagcctgattgctacggttaaacttgcgtcgatcaataccagaagattcgatcagcgcatccagttcacccactgcgtcgcgccactgctgttttaccgtatcaatacgcgccacaatttgcgcgtgacgggaagccagcgtttcatcatcgggcggcggtgctttgataaccggcgcttcgccttgcagataacgattaatatcgcgcagcaacgcctgcggccctttccaggtttcaaagacgacctgggctatttcacgcggcagcgggtagcagtggcgacgccagaaatcggcgcaggcctggtagcgtagcagagactcatcttcaatcagctgctgctcaaacagcatgccggattcaaaggcattcaggttgagcatgcgctggcaaaagccgtgaatagtaaagactgccgcttcatccatctgccgttcggctaacaacaaccactgcgcggcttgcgctttatcgtcgatctcttccagcaggcgttcgtacagtggattgtcggtggtttcacgcagacaggcgatgcgcaactcgtggatattgctacggatacgaccgcgcaattctgccgtggcagcctcggtaaaggtgaccaccagcagttcttcaacggtcagcgggcggggaaaggcggcggaaccgcctagtccaagtaacaggcgcaaatagagcgccgcaatcgtaaaggttttgcctgtgccggcagaggcttcaatcaggcgctcaccctgtaagggcaagcgcaaaggatctagtgtctcggcgacatcactcattcttttcactcatcaggggcattgtttgctgcaacgcgctgacgttctcccacactttccagccttcagggtgtacatattcggctttcccgttctggctgccggaaatctggctcagaatagccatgccttgcggctcgaccaccgcctgatggaagaaatcagcaagtttttgcggcgtcagcagttttatctgggccacgattttatcacggctatcgaagcgcatattgccgcgatcgaaatctttacttaacttgcttgcttcttcgccgagcgtttgcggtgcctgcagcatctgggtaattaccgcctgctggatttgcgcaaactcatctggcttcatcgctcgcaattttgcctctgcggttgggaaaaacgccttgtaacgctcccacaagaaactaggctgtttatcattgctttgcaaaaggaagcccatgccccactgacgccccacgctcattggaaacgcaaacacggcatagcccaattgttcttcggtacgcaactgattgtagaaccacggctgtacgatctgccccaacagagagctataggcactgctggtgtattcatcgtagccagtcggtacaaataccgctgccagtgcggagtcggtgctgttaccggctttttcaaagatgacggattgttttttatcgaccactacatctttgtttcgacaccactcactaccatcagcgcccaactgtttttgcacatcgcgtgccagcgttgttgcctgggcctcggtcatgttgccgataaccataaactctggtcgagccccactttttaaggcgtcgcgataggccagcacctctttcaacgtaatggagggcaaaattttacgccgttcatctcggctgaagtacggcacttggctgagcatctgcgcgggcataatcgcctgctcaaacgctttacccttttctgcggaatccatcatctggttataccaggacttcgcctgctcaagctgatcttccgtagcggtatagctaaagtacccctcgagcaatgcctggaacagctgcggcagacgctgggtgtaaccattagcattaaccataaggccgttgttagcgttggtggaaaaacttatgccaccaacgctcgcctggttgcttaactgatcaagcgccagccctgcgagataatcattgagcgcaaacatcacctgattgcgggcgctgtccatggctttcggattacgcaaaatcaggctgacatcagctttgggctcgctggcaaaataacggcttggcgcatacaccacgcgcagattgctctcatcaacaatcagctctggatggtcgtatttcttctcactcttaatcaggctgaaatcatcaggaatataagggttaagctctggcaaagagagcgcaatgtcggcggcttttttctgccagtcggcgaaagtttgtgcgctgattttatcgacctgatacggcgcatcgacaaagtaagccgttttgttgtgcggctctttcgggctgatataccagatacgcgcattctgcggcgtcatcatcgccagacgttcctttactgctttagcatcgtaccgatcggcaatattgactgcatccagcgtatgctcaacaggaacgcgaatcatggtatctgccagccattcgacgtaatccatatcacgggtgatgctcggataacggaagtcgatatccagcacattcgccagttcatcgaagtattgtttatcaatgcctttttcacgtaacagattgagatagctaaaaattgccgccacaacctgatcgcgattagccaggcctttatcggttaaagacgcagagatcgctaatacgccgctgttgccgttgacgataggatcggagttggcgctaatgccctcaactaatccctgcttttgcagccagtcagaaagtgtacctgggctgcgattgccaatcagataggtaatcaattcatcggttttactacggaacttcgcactgttgttatcgatgcgaaactcaacgcgcaacactttacgcggcagcgcagggacgtaatgaatgataatgcccttttgcgcgtcggtgactaccggcacggtgatttccggttttttgctctctttgttcggcacgcgaccaaaggtgtccgccgccatttttgccaactccggcagcggtttattactgtaaataaccgccttcatcaaattggcggaatagtacttctcgtggaaatctttcagcgcctgctgcaccggattaccaggtttgtcgcttaaagtttcgaggttaccaccagaaaacttactaccggggtgtgccgggttaatggtttctgcgctgacctgtgccatgcgcatcccgtcacgcgtacgcgccatggttaattcagcgttcaccgcattacgctcacgttcggcatatttcttgtcgagcaaaggttcagcaatagcatcggccaggcggtctaccgcaccaggcaaggcgtcgttctcaacttccagatagaaagccgtgcgatacggcgcagtgctggcattgtgactaccgccgtgcattttgagatattcggccagactgtcagcctgcgggtactttttgctccccatcagactcatatgttcaaggtaatgtgccagcccctggtacgcctcgggatcttccaggctcccaacgggcaccaccagcgcgctgaggcttttaactgcctgcggatcagaaaccagcaagaccaccataccgttatccagacgtatagcctgatactggcggttatctttatcacttttacggatggtttcctgaatcggctgccatcccgtttctgcctgacttaagggtgcccaaagggcaactaacaacaataatgctttgaaccaggtgctgcggggcattcacggacctcataatcaacttaattttctgtccagattcaacacgttaacgcaaatcatctgccagaatttaatcttgtgctgcacgagtcagcctatgtttatataaccatcagtccgtgactggtgcgcatcataaagtaagcggatagattgcgcaatttttatacagcactcaactctgattaaagcgaaacagcggtaacaggaaacgttggctctgttcaacgatggcctccattgtctctggtgttaattgccgccagagcctttgataccagatatcatcaccttcgccacgcaccatcatgttgccttcgtaagcctgaaggaatttcgtacgggctttttgcaacgtggaatcgtcatccagcatggcatcgttttgcgcgtcataacaggtttttagccacgcgccgccactttcaggtaacaccagcaatggcgcggacattccttcacgatacccctcaatcagttgactgaggtaatgcaaagcctgttcggctgcaagcggcggaaaacgccactcgccgtctttgcgtagaaaaaggcgactttcaccattaccaccgctggcacagtagacaaggtgttccagccaaagttgcattccctgggccacacttaataaagagggacgccagcgcaacaggccatccggctgcacctgcggcaaccagccagttatctgcacaccgttgcaggcgagatcaatttccatactctgccccggctggcgacaggcaatgactctgtcggcaagctgctgcatctcctggcactgtgtttcccagaaaatttcaccaaaagcgccatacggtaaatcccctgccgctcggaagcggcggaacaagcgttcggcatcatcctgctcaaccagtgcattcaataactgctgattgatttgataacggctaagtccttccagaataaatggctcggtgtcggggatttcgctgtcttcagtacggaagttcacctgcaaacgcatctggaaaaatgcccgcaccggatgtgcccagaatcgttgtagcgtttccagcggcacggtttccggtaaggtaaacggcagcggctgaacaaattcagaatgtgctttaccagcctggctggccgcaggtagccattcacgagcatagctttgtcgttcgcctggctggtagttttgtggatcaaacggcatccgggtatggaggcaagtaagatgcgcttttacccttgcctcgctttcatcacagttgagcgcttcatcgcccggtagataatgactttgcccgatgtagtcgatcagttcctgcaccagtacgctcgggaaacgctcactgttatcctgaatggaacgaccgatatagctgatatagagtttttgctgcgcggaaattaacgcttccaggaacagatagcggtcgtcatcgcgacggctacggtcgccacgcttcggtttctggctcatcaggtcaaagcccaatggcgcaagctgacgtggataaacgccgtcgttcattcccagcaggcaaaccactttgaacggaatactacgcattggcatcagagtacaaatgttaaccggtccggcgagaaaacgctggctgatacgttcttgatccagacgctgtgccagttcatcacgcaatagactcagcggcaccgcgtcgccatactgcgcacctaaaccttcggcgataatcgcctgccattgttgttcgatcagcgtcatcgccgcttcggtttccgcatccggcaggaagaaggcgttgagcatatcgcgacaaaccggcaaccactcttccagcggacgctcctgtgccagcccgcgacgccagatgtttagctgcattagcagactagccagatgccccaccagttctgcaattaagccgctgctttcatcataaggtagaacgctttgccactcgccctgcgcgctctccatcgcgtagcccaacaacatacgcgtcaggccaaatcgccaggtgtgttgtccggtggcggggagttccagctcgcgaacgttgtcgtcatctatgccccaacgaatgccggattcgttgacccactggcgtaaataacgcagcccttcttcggtgatgtcaaaccgcgccgccagcaccggcacatccagcaacgccagcacatcctcactcacaaaacgactgtcaggcagacttaacaggctgataaacgcttccagtaccggatgactctgccgcgcacgacggtcggaaatggcgtaaggtaggtaacgatccgcaggtgcgctaccaaacacagcctgaataaacggactgtagctgtcgatatcagccaccatcacgatgatgtcgcgcggagtaagtgtcgggtcttcctccagcatcgccagcaggcgatcgtgtaaaacttcaacttcacgctgcgggctatggcaaacgtggaaggtgatactgctatccagtggatcaagcgggcgtttgttatcgctacgggaaaactcttcgatgttcacaccagcaacggcgcggttttccagttccagaatgtcagactgaatgttatgcagcaggttatctggcgtgacatcgacaaaggcgtccagctcctggctgctctccaggtcagaaaggagataaatgtagtcgcgcccaagcttaccccaactagccagcagcgggttgccgacatcctgttcaccatcgctgttaaagagctgcccggcattttcgctatcacgaaatagcggcaattcgcgatcttcaaaactgtgtcgacgctgacgggtcagcagtttcgccagataagcaggatctttaatatcgccccagtaataacggcaggggttggtaaacaggagatggatttcaatatgtttacccagcgcctgtagcgcctggagataaacaggcggtaacgcggaaataccgcatataaagacgcggctaggtaaccccggcgggcaggtcgtcgcggactccagcgtttcgataaagcgctgatagagattggcgcggtgccagcgcggttgcccgagttgatgggtatattccaccagcgccttccacaacggggcttgccaggcctgtgcttctcccagcccttcaaccaaatgtcctgtttcccactgtgccagccagtccggacgatagaccagatactggtcaaacaggtccgccgctttactggaaagctggaacagttttcgcttgtcgctatcgtcagtcagataatgccgcaacagggtaaagtcttcgcgctccagcaattgcggcagcagagtcatcagtttccagctcatgctctgtttgttaaaggcgctctctttggggatttccggtaacacccggacgaacatatcccagataaagctcgctggcagcggaaaatcaatgtttgccgcaataccaaacttttggctcagggtcatttgcagccactgtgccataccggtactttgcaccagaatcatctctggttcgaaaggatcgtccagccgttcgcgttcgacaataaactccatcaacgcttccagcacgtccagacgattggaatggtagacccttaacatagcggctcctgattactgacgattcgggcaatgcaggcgggtcatctcgccttctctgcccccgggactaactagcgtaacgctgatgctgacacatcccgcctggcttgtctgcattcggttgacctgccagttggcaggtgggctaatcgcgcgcagttgcgtttgctgccagccatgccgccagagctgttggtactggtttctgctggcaagactgttcattaatgttcgctggaaaccgcttaacgcagtgacaatcatcaccatcaacaccatcgccaacattacctccggcaggctaaagccttgttgattcttcagggaagcactcataacgccctctctttcagcggttaaatcagggaagctgacataacgccctctctttcagcggacaaaaatcgctccagccgcgtgggctaaaaacaatgtttccatcaatgacttcgcctgttcgccacaagctaacgccttcataaccggcaatcaataaggcttcattatctgccagtaaacgcaaacaaacctgggcatcggtttcagcgtactggctgcactgaactgctggctgcgtctgccagcagtgcatttttccccacgccagcgcgctctgaacgatggcctggcggcgcaaactctgactttccatgctcacgcgagaggcaaaactgcgatcctgttggctcattccttgtaatagcaaactacccaaaaccagcagcatcaggaccagagccagactgctaacacccttttcgcggttcacaggttgaatcctgtcacgctatagctggcattcaccacggtttgcggttcagacttactggcagcacgcatattaaccgtcaacaccgggctgaagccgctgacatcctgacgtacgacctgaaaagtgtcgataatgatggcatccggattagtgactttatcccagcccttaccttcacaggatgtcgcaccgcgtagcgtttccagcacatgctccttcagacgaaatccaatctggtcggactcttttaccggttcgcgatcccagataccgttactgttcgcatcccactgcacaatgacacagtcaccctgtccgacaatttccagcccttcgccggtacagatgccatgacaataacccgccctctggagatgcttcgcgacggtaaatacccgcagccagatttcatcttccagcgccagcttacgggtgctcgttaaactttcacgctgtaacgcaggcagaaagcgtgccgcccccagcaacaatacgccactgatcgccatagcaatcaacacttccagcagagaaaaaccttgctcttttacaggcatccttctgtttctccttgctgacaaagccggagtcttccccacgggctaaccaccagccaccactcgcccgtactgtttttgaagcgaatatgcccggcccatgcggtattgcgcaggccaaagaaagcaaggctaggtgtcaggtcgctcatttcgacttcgggccagcgtggcacaaagaccaatggactactgccatgacaggtattggccccagcagcggaactcacaaggcaccataacgtcccctccctgataacgctgatactgtggtcgcggttatgccagttggcatcttcacgtaaatagagcaaatagtcccgcgcctggctggcggtttgccatagccgttggctctgctgccagtattgccagccatagagtccacttgcgcttagcatgaccaaaatcagcatcgcgaccagcgtttcaatcagcgtataaccacgttgtgttttcatgccggcagtatggagcgaggagaaaaaaagacgagggccagtttctatttcttcggcgcatcttccggactatttacgccgttgcaggacgttgcaaaatttcgggaaggcgtctcgaagaatttaacggagggtaaaaaaaccgacgcacactggcgtcggctctggcaggatgtttcgtaattagatagccaccggcgctttaatgcccggatgcggatcgtagccttcaatctcaaagtcttcgaaacggtagtcgaagatggattcgggtttacgtttgataatcaacttcggcagcggacgcggttcgcggcttaattgcagatgagtttgatccatatggttgctgtacagatgcgtgtcgccaccggtccagacaaaatcacccacttccagatcgcactgctgcgccatcatatgcaccaataacgcgtagctggcaatgttgaacggcaggccgaggaagacgtcacaggagcgctgataaagctggcaagagagtttgccgtctgccacatagaactggaagaatgcatggcacggtgccagcgccattttatccagttcgcctacgttccacgcactaacaataatgcggcggctatccgggtcgtttttcagctggttcagtaccgtagtgatctggtcaatatgacgaccatctggcgttggccaggcgcgccactgtttaccatacactggcccgaggtcgccgttttcatcggcccattcgtcccagatggtgacattgttttcgtgtagataagcaatgttagtgtcgccctgcagaaaccacagcagttcatggatgatggaacgcaggtggcaacgtttagttgtcaccagcgggaatccatcttgcaggttaaaacgcatctgatgaccaaaaatggaaagcgttccggttccggtacggtcgtttttctgtgtgccttcgtcgagcactttttgcatcagttctaaatactgtttcatggttcctcaggaaacgtgttgctgtgggctgcgacgatatgcccagaccatcatgatcacacccgcgacaatcatcgggatggaaagaatttgccccatgctgatgtactgcacccaggcaccggtaaactgcgcgtcgggctggcggaaaaactcaacaatgatgcgaaacgcgccgtaaccaatcaggaacaaaccactgacagctcccattgggcgtggtttacgaatatacaggttgaggataataaacagcaccacaccttccagcagcagctcgtaaagctgacttgggtggcgcggcagcacaccgtaagtgtcgaaaatggattgccactgcgggttggtttgcagcagcaaaatatcttctgtacgggagccagggaacagcatggcaaacgggaagttcgggtcaacgcggccccacaattcaccgttaataaagttgcccagacgcccggcaccaagaccaaacggaatgagtggtgcgataaaatcagagacctggaagaaggaacgtttagtacggcgggcgaagataatcatcaccacgataacgccaatcaggccgccgtggaaagacatgccgccgtcccagacacggaacagatacagcggatcggccataaactgcgggaaattgtagaacagaacataaccaatacgtcccccgaggaagacgccgaggaagcccgcatagagtaagttttcaacttcatttttggtccagccgctgcccggacgattcgcccgtcgtgttgccagccacattgcaaaaatgaaacccaccagatacatcaggccgtaccagtgaagcgccacgggtcctatactgaaaatgaccggatcaaactccggaaaatgcagatagctactggtcatctgtcaccacaagttcttgttatttcgctgaaagagaacagcgattgaaatgcgcgccgcaggtttcaggcgctccaaaggtgcgaataatagcacaaggggacctggctggttgccggataccgttaaaagatatgtatatgatccgcgttataaccctccgcgaatcagcccgcccatgccgcgacgctccataaaggctgcaacctgatggcgaacttcggtcgccagttgcgcttccagactacgctgcgcaagattttctgcttcggcataatcaatgcgccgcagcaggtattttgcccgcgctacagaacgtccgttcatagacagatggcgatacccaagcccaatgaggattgccacgcacatgggatcgcccgccatttcaccgcacaaacggagatcgattccatgtatttccgcttcccgggcgatcatcgccagagctcgtaacattgcaggatgaagactgtcataaatgttcgccacccgggtattgttgcgatcaacggccagaatgtattgagtcagatcgttggtgccaacagagatgaaatcgacccgctttgccagatgcggcagcataaataccatactcggcacttccagcatgatgccgatacgtggtttgggaatttcgtaaccgatcatctcctcgacttcacgtccggcacgttcaatcaggcggcgtgcttcatcaacttcatcgaggcttgtgaccatcggcaacagaatattcaggttgcccgtagcggcattagcacgcagcatcgcccgcacctggatcaagaagatctccggctgatcgagcgtaatgcgaatcccacgccaacccaggcatggattctcttcgctgatcggcatgtaaggcagctgcttatctgctccgacatccagcgtacgcaaggtgacgggtttatcattgaacatttgcagcatcccctgatactgcgccacctgttcttcttcgctcgggaaaccactttgcagcatgaatgggatttcagtgcgataaagaccgatgccatcaatacggctgcccagtttttcttcatgttccgggcttaaaccagcattgagcatgacttttatacgctcaccgctttttaactgcgcgggtaaattgacgtcatcttccgccagacggctaagctcaatctcttcactaattagccgctgatattcttgcagcagtaccggctccggatcgaccagcaattcaccgcgatagccatcaacgatcagcgtcctacgatgcagcacgctaggctgaatatccgcgcccatcacggtagggatccccagcgcacgtaccatgatcgcagcatgggagttggctgcgccatctcgcacgacaacaccgactaagcgatcctggggcagctcagcaagcgttgtcgcactcagttcatctgccaccagaatgaaacgttccggccaggcgttcggcccttgattagcgtcatcaagatgaaacagcaatcgctgacccagcgcacgtaaatcgccagcccgctctttgagatagttatcacttagcgcggcaaactgttcggcaaatttttcaatgaccgtttttaccgcccactctgccacgctgcctttatcaacctcggcaaacaattcgcgacgcagccgggtgtcgctaagcaggtggctgtaaagatcgaaaatagccgccgtttctttttgtgcaccggcggcaaagcgtttgctgtagcggcgaaactcgtttgccgcttcttccagcgccccggtcagtcgttcgcgttccagagccggatccagcgtacttgcctgatacacctgttccattaaaggtaacgtggcatcctgccagccttcggcaatcgccacaccaggtgctgccggtaatgcgcggattcgcgtctggcgatattgcccaaacaaggcagtcaactggctctgagaaagaatagctgccatctgggtggcaagcgtcaccaggaaggattcttcactttcgtcatactggcgcaactctcgttgctgtaccaccagtacaccaagcaactggcgacgttgaataattggtacgcctaaaaacgcgcggaaacgttcttcttttacggaggggatgtatttgaagctggggtgcttttgcgcatctgcaaggtttatcggttccgccagcctgccaaccaggccgacgatcccttcatcaaacgcgagcgttacagtgcgaccgcgtggttttttcagcccccgggtcgccatcaggtagtaacaacgtcgatcatgatcggccaggtagacgctacagacctcggtatccatcgcaagacagatgtcggtaaccagaatatttaacgcctcattcaggcgtggtgcgctggctaccttttcgactatttcgcgcaggcgagtgagcataattggcgtgacttaacctcttttacgtcgataagcagatgcgttttgtggttttggcgtattttcctgcagactcatcaccacactcgcgaactctttcattaccctacggtagacatcacgtttaaaactcaccacctgtctgaccggataccagtaacttacccatcgccagccgtcaaactctggtgtactgctggtttgcatattgatttctgcatcgccgctcaccagctgcaagagaaaccatttttgtttttggccgatacaaaccggcttcgtgtcccaacgcaccaaacgtttcggtaatttgtagcgcaaccagttacgcgtactagcaaggattcgaacgtctttgcggcttaatcctacttcttcaaacaattcacggtacatcgcctgctctgcggattctccggggttgattccgccttgcggaaattgccaggagtgctgaccaaatcgccgggcccacattacctgcccctggcgattacaaatcacgatacctacgtttgggcggtagccatcgtcatcaatcaccggactacctcaaaataaagctttatatacgaatgattgtttcatactccaggaagacggtaaaccactctctgcagggcattacacactaataacaattgaataactcacagttatgtgcagagttataaacagaggaaggggtggatagccgtttttattcaccttttctgtggatagagttgtgaagaactacggaattactacgggaaaacccggagcattctgaataagcccgatatagacattttaaaatattcattatcagtcaatgcattacatgtaattttagtaatgaaaaagagtaattcgtgacccaggtcacacctctcatttacgggttggcgaaagatcaaccaatgccgtatttatccacagaatgtgccactaagttaagcactgaaccactaaaaactggagtttcgtcgcacgtcaaggctgtaaatggaaacagtagtggaggtttttcacagttatcccagctttctgtggataacatggtgtaagatcctgtttattttcagtgaccagatttggaaaacccgttgcagtgttgcgcaactcgattaccggcaacctaaaaagcaatataaatcagagaattgaacaacgcatgtggaaaaagttacactgcgaatattcggcacataattgctgtttgttttttaatcaaggtatcatgacatgtcccaacctcgcccactgctctctcctcccgaaactgaagaacagttgttagcgcaagcacagcaactttctggttatacattgggagaactggcggcacttgtcgggctggttacgccagagaatttaaaacgcgataaaggctggattggcgtgttactggagatctggctaggtgccagcgcagggagtaaacctgagcaagattttgctgctctgggcgtggaacttaaaactatccctgtggatagtcttggtcgtccgctggaaacaacattcgtttgtgttgccccgttaacgggcaatagcggggtgacctgggaaaccagccacgtgcgccacaaactcaaacgcgtactgtggataccggttgaaggcgagcgcagcatcccgctggcgcagcgtcgcgttggaagtccgttgctgtggagcccgaatgaagaggaagaccggcagctacgcgaagactgggaagaattaatggatatgattgttctcggtcaggttgagcggattaccgctcgtcacggggagtatttacagatacgaccgaaagcagcgaatgcgaaagcgcttaccgaagccattggtgcccggggcgaacggattctgacgctgccacgcggcttttatttgaagaagaatttcaccagtgcactactggcccgtcattttctgatccagtaaccatcgctttgacctgccgctttccgggcatataattaccgcttcatttttttggcagggctttttagatgttatttgcatggataaccgatcctaacgcctggcttgcgctcggtacgctgacgctgctggagatcgttcttgggatcgacaatattattttcctttctctggtggtggcaaagcttcccacagcacaacgtgctcatgcgcgccgtctggggttggcgggagccatggttatgcgtctggcgctgctggcaagtatcgcctgggttacgcgcctgacaaatccgctttttacaatattcagtcaggaaatttctgcccgtgatttgattctgcttctgggtggcttgttccttatctggaaagccagcaaggaaatccacgaatccattgaaggtgaagaagaagggctgaaaacacgcgttagtagtttcctcggcgctatcgtgcagattatgctgctggatattatctttagcctcgacagcgtgattacggctgtgggtctgagtgatcacctgtttattatgatggcagccgtggtgattgccgtaggcgtgatgatgttcgccgcgcgcagcattggtgattttgtcgaacgccatcctagcgtaaaaatgctggcgctctctttcctgattctggtgggctttaccctgattctggaaagtttcgacatccacgtaccgaaaggttacatctacttcgcgatgttcttctctattgcggttgaaagcctcaacttgattcgcaacaaaaagaatccgctctgatactccgtacgctctcctgcgggagggcgtactcactccttttaccctcacagtttaagattttcctgctttcaagatatataacgtcggtttataaacagactattatcataggtaggccaaatgaggataaccggatgaaaaaatgggcagtaataatttctgcagtcggactggcgtttgctgtttccgggtgttccagtgattacgtcatggcgaccaaagatggccgtatgattttgaccgatggaaaacctgaaattgatgatgataccgggctggtgagttatcacgatcagcaaggtaacgcgatgcaaattaaccgtgatgatgttagccaaattattgaacgttaacaaataaggtcagcatccggctggccttaagatttttctctttcccttttcccttccctctgccatttttatattccttatgtcgtgattataaaaaggaaacggctatgcaatatcaccgtataccccacagtagcctggaagtcagcacgctggggcttggcacgatgacgtttggtgaacagaacagcgaagccgacgcccacgcacaactcgactatgccgtcgctcagggcattaaccttatcgacgttgccgaaatgtacccagtacctccgcgccccgaaacgcaagggttaaccgaaacctacgtcggcaactggctggcgaaacatggcagccgcgaaaagttaattatcgcctccaaagtgagcggaccgagccgcaataatgacaagggcatccgcccggatcaggcgctggatcggaagaatatccgcgaagcgctgcatgacagcctcaagcgcctacagactgattacctcgatctttatcaggtgcactggccgcagcgcccgaccaactgcttcggcaaactcggttatagctggacggattctgcgcctgcggttagcctgctggatacgctggacgcactggcagagtaccaacgcgcgggaaaaattcgttatatcggcgtgagcaacgaaactgcatttggcgtaatgcgctacctgcatctggcggacaaacacgatctgccgcgtattgtcaccattcagaacccttacagtctgttaaaccgcagttttgaagtaggtctggcagaagtcagccagtatgaaggggtcgaactgctggcctatagctgcctgggtttcggcacgctgaccgggaaatatctcaatggtgcaaaacccgctggcgcacgtaatacgctctttagtcggttcacccgctatagcggtgagcaaacgcaaaaagccgtcgcggcgtatgttgatatcgccagacgtcatggcctggaccctgctcagatggcgctcgcgtttgtacgccgtcaaccgtttgttgccagcactctgctgggcgcaaccacgatggatcagctgaaaactaacatcgaaagtttgcatctggagttaagcgaagacgtattagctgaaattgaagcggtgcatcaggtttatacttatccggcaccataagattaacgccggttaaaaccggcgttaaatattaatgacggcgctgccagatccacagcgccgttattgccagcgcaaacagcgcaccgaagccaatgccaatgggcacgaccgggatgcctatcattaccgccaggctgtaaatgcccagcatcaacaacatggcgctgttttcgccaaggttttgtactgcaatcgcattccccgccccgacgctttttttaccccgctcctgtagcaacgcattgagcggaacgacaaaaaagccccccatcacgccaatcagcatcaacaaggcataggctggcagcagctcgtgttgcagggaaaaaatcagtaccaccacgccaatcaaaatcccggctggcatacagcgactcacggtttccagcgtaactaacttcgctgccgcacctgcgccaaccacgataccaatcgctaccatcgcgttgagataggtgggcgtagcgttatcggtaatgcccagcgccaccggtacccacagcaccaacaggaaacgcagcgtgacacccgctccccagaataaactggtgcccaccaggctaaaacgcgtttcaccattgcgccataggctggtgcaggcattcaggaaactgcgggtcatgttgatgagattccaggactgccccggacgcgccgccgccagtttgggaatgtagatattggcaacgaccgcaccaccgtaggccagtgcgcatgcggccagggcgacgaggacatgccagtcagccagcacaccaccggctacggaaccgagcaaaatcgccgctatggtagaagcttccattaaaccgttagctttcactaacttactacccgtggttaattcgccgagaataccgtatttcgccggactataggctgcagcaccaacacccaccagcgtatagccgagaaacggattgataccaaagcagatactggctgcgcccagcagcttcaggccgttggcaaacatcatcacccggcctttggcgaagctatccgccacctgcccgacaaacggcgcaaaaagaatgtaagcacctacaaacaccatttgcaggatgggctggctccactccggatagaactgcgctttcagtaacgccagagtggcaaacagtagggcattatcgccaaacgcagagagaaactgcgccacgataaccgctttcatccccttgctccacaagctagtgttagtgtgcacactctcactcatcgtgttgttccgcttcgtctacccagcttttcaacgtgacaaagtcaggtttgccgctgccaagtaatggcatctgtttcagatagcgaatatcgcgcggtacagcaagctccggcacgccgtgctcgcgggcatactgttgcaacttatcgcgcgtcagttcgttatctgtggtgaaaagcaccagtgcctcgcctttgctggcatcgctcttaatcgcagtggcatggactttatctgggctaacaccaagtgccagttgttccaccatttccaggctcaccatttcgcctgcaattttggcaaagcgttttgcgcggccctgaatctgcacaaagccctgctcgtcaaaacgcacaatatcgccagtgtcataccagccgcgctccatttcgccgcgaacattctcggcggtgggcacttccagtacacctggcttctccacccgcagatagccgttcattatgttcggccctttcagttgcaggcgtccgccctcttcgataccagggacgctcaacaggcgcgcatccattcctggtagaatacgccctaccgtaccgggtttcgccgccatcggtacgttgatagaaacgacaggcgcgcattcggtcacgccgtagccttcaaggatgcgcaggccaaatttatcctgccaaagctgtttggtactttcttgtaatttttctgcgcctgccaccacatagcgtagacgatagaagtcatacgggttggcgaaacgcgcgtagtgaccgaggaaagtgctggtgccgaacaacacggtgcaactgcggtcatacaccaactccggcacaatgcggtaatgcagcgggcttggataaaggaacacttctgcacctgtaagcagtggcgtaaacaggcctaccgtcagcccaaaggagtgaaacagcggtaacgcgctcataaagcgatcgttggtggtgaagtcggcaatcgttttaatctgctcgacattcgccagaatgcttttatggctatggacgacgcctttcggatggccttcagaaccggaggtaaaaaggatcagcgcctcttcttccggctgctgtttaacctgtgccagacgcggcatcagcaaatgagcgaagatccatactttgtcggcagtggtgacatctgcttttaaatcttccagatagacccagcgcacctgagtaagttgctccggcagatgccagagtttgcctttatcgagaaactggcgggaagtgaagatggttttgatttcagccgccgtaatagcactggtcagcccttttaccccggcagtgtagttcatcattgcgggcatgcggcgacgggcgatggccccaaaaatcactgccgcactgatgcctgcattgggcagcattaagccgatgcgttcgccttcaacactgtatttttcaaggatgcgtccaacaaacagcgttttcgtaagcaatttgcgataggagtctggggtaaagttgacgtcttcgacacatttcttcccggctccgaagcggtacattgcactcagtaaagattcgtacagcgtttcacgcgggcgcaccgccattcgcgcttccatcattatttgatgcagcatttcgccagcgattttgcgacggtcacgggcacgcggcgcatccggcatcgccacctgcgttggtggcaaaatatgcagagtaatttgcgggaacaagcgacgtttaaccagacctttcaggcggctgaagtgcgtaagttccgccccttcaatacgcacaggaataaccgtcgcaccagacttcgccgcgacaaaacccgcgccatcgtagattttcatcaggctgcctgtcgtggtgatgcgtccttcagggaaaatcaccactggtcggccctgttccaccagacgtaccagatgtttaatagccataggttgcgtcgggtcgagaggaacaaagtcgataaaacttttcagccaacgcatataccactgttggcttatactggtgtaaacggcaaacactggacgcacaggtaaaaacagtccaagcaaaatgccatcaataaaagagacgtgattaggcgtaattagaacgcgctcgcccttcagtgcctgggtgtcacccgtaacgcgaacgcgatacaaaacacggcacaaatttcgaaaaaagctaaaaagcattccaactccctttgctctgattcagtaaaagcgaatggagggagattacacgagataaagaacgcgagcgacagtaaattaggtgcgaaaaaaaacctgcgcatccgcgcaggttggtgcaagagacagggtacgaagagcgtaccgaataatctcaccaatcaatacctctgggatcttgattgtggtctgcacgacgactcttcgccagcgagaaaacgcaaaggaatgaagggaaatgcaacgaggtgtgtaaattgtcggttactgttacagattgatgaccggcaaaaaaaacctgcgcatctgcgcaggctggtgtaattcatgtgctcaacccgaagttgacttcacctatcaatacctctgggatcaccactttagcaacctgaagccaaacgccaccagcggtcaatcgcaacagcgtttcgcaaagtgtaaccaaaggtttgcaatctctttttttgtcttacttatttgcgtttggctcacattcccacgatgaaaacacgccaccccttgaaccaacgggcgttttccgtaacactgaaagaatgtaagcgtttacccactaaggtattttcatggcgaccataaaggatgtagcccgactggcaggcgttagtgtcgccaccgtttcccgcgtcattaataatagtcccaaagccagcgaagcttcccggctggctgtgcatagtgcaatggagtctcttagctatcacccgaacgccaacgcccgtgcgctggcgcagcagaccactgaaacggtcggtctggtcgttggtgatgtttccgatccgtttttcggtgcaatggtgaaagcggtcgaacaggtggcttatcacaccggtaattttttattgattggcaacggttaccacaacgaacaaaaagagcgtcaggccattgagcaactgatccgccatcgctgtgctgcgttggtcgtccatgccaaaatgatcccggatgctgatttagccagtttaatgaaacaaatgcccggtatggtgctgatcaaccgtatcctgcctggctttgaaaaccgttgtattgctctggacgatcgttacggtgcctggctggcaacgcgtcatttaattcagcaaggtcatacccgcattggttatctgtgctctaaccactctatttctgacgccgaagatcgtctgcaagggtattacgatgcccttgctgaaagtggtattgcggccaatgaccggctggtgacatttggcgaaccagacgaaagcggcggcgaacaggcaatgaccgagcttttgggacgaggaagaaatttcactgcggtagcctgttataacgatagtatggcggcgggtgcgatgggcgttctcaatgataatggtattgatgtaccgggtgagattagcttaattggctttgatgatgtgctggtgagtcgctatgtgcgtccgcgcctgaccaccgtgcgttacccaatcgtgacgatggcgacccaggctgccgaactggctttggcgctggcggataatcgccctctcccggaaatcactaatgtctttagtccgacgctggtacgtcgtcatagtgtgagtactccgagcctggaggcaagtcatcatgcaaccagcgactaaccgcagttaaagcaattccagcgccagtaattcttcgatggtctggcgacggcgaatcaaccgcgcctgaccattatcaaacagaacttctggtaacagcggacggctattgtagttggaactcatacttgcgccatatgcccctgtatcatgcagtaccagataatcacctgccttcacttccggcaaggcgcgggtttcaacatttcccccttcctgctgggtaaagacatcgccgctttcacataacggtccggcgacgacggtttccaccgttggcgcgtgttccagagaacgaccatcagctgccagggcactgatatggtggtaactaccgtacattgccgggcgcatcagatcgttgaacccggcatcaaccagcacaaagtggcggctccccatttgtttgacgctccgcacctgagtaattaatacgccagactgcgctaccaggaagcgacccggttcaatttccagtttcacagggtggcccaaatggcgggcgatttgctcacgcgcggcattccacagaccataataatgttcggtatcaaccgcctcttcaccctgttgataaggaacagaaagcccaccgcccgcagaaatagcctgtaaatcctgaccgaattcgatgacctgacgcaccatagcaccacacacctgttccagatgggcataatcaacgccagaaccaatgtgcatgtgaatgccgaccagctgcagatgatgacgttgtatcacgtccagtgcggcgggcagatcggtgtaccagataccgtgcttgctgttttcgccaccggtattggttttttggctatgtccgtgaccaaaccccggattaacgcgcagccatacccgatgccctgggctaacctggcccagttggtcgagcatatcaacagaacccgcattcaccggaatttgcaattcactgacgcgttcaagcgtcgcctgatcgataacatctgccgtaaaaacaatatcatcggggtgcgtttgcggattgtaacccgccgccaacgcacgctctatttcgcctaagctgacggaatccactttcacgccctgctcacgcattaagcgcaaaatatgaatattggaacaggctttctgtgcaaagcgcaccacatcaaactgtttcagcgctgcaatctgccgacgaataatttgcgcatcgtagacccacaccgggcagccaaattcagcgggcaaacgcagcagattttcggcggtgagatcggtatcggtgctgaacagactatgtggcataacaaactccagataagtgcttttttatgattacgccacatcataaaaagaataaaaaatatcgatttatgtcgagtctatgcaaaaatgatatggattaccggattgcgagagagcgctaatggccgccgttaacttacgtcatattgaaatttttcatgcggtaatgaccgccggaagcctgactgaggcggcacacctgctacacaccagtcagccaaccgtcagccgcgaacttgcgcgctttgagaaggtgatcgggctgaaattgtttgagcgcgtacgtgggcgattacatcctaccgtgcaaggactgcgtctgtttgaagaagtgcaacgatcctggtacggactggatcgcattgtcagcgccgcagaaagtctgcgcgagtttcgccagggagaactgtctattgcctgcctgccggtctttagccaatcttttttaccgcagctcctgcaaccctttctggcacgttatcccgatgtcagcttaaatatcgtgccccaggaaagtccgctacttgaagagtggctcagcgcccagcgtcatgatttaggactcactgaaacgctccatacgcctgcgggaacagaacgtaccgaattactctctttagatgaagtgtgtgtgttacctccgggtcatccgctggcggtaaaaaaggtattaacgccggatgattttcagggtgagaactacatcagcctttcccgtactgacagctatcgccagttgctggatcagctatttactgaacatcaggttaaacgacgcatgatcgtagaaacccacagcgccgcgagtgtctgcgcaatggtacgggcgggggtaggtattagcgtggttaacccgctcaccgcactagattatgcggcaagcggtttagtggtgcggcggttcagtattgcggttccgttcaccgtcagcctgatccgccccctgcaccgcccgagtagtgcgctggttcaggcgtttagtgggcatttacaagcggggttaccgaaactggtcacttctcttgacgctattttgagcagtgctacgacagcataattagctcagcataaaagcgacagcatcctcggcatggatcgccgcggtatcaaacacaggcaaaacactgcgctcttctggcaccagtaaaccaatttctgtgcagccaaaaatgacgccctgtgcgccctgttctgcaaggcgagcaatcacttgcgcacaataagcgcgactcgcttcggtaaattgccccagacacagttcttcaaaaataatctgattaattttcgcccgttcatccgcttcaggaataagacaattgatggaaaattgttccgtcagccgcccgcgataaaaatcctgttccatggtgtaacgcgtacccagcagcgccacacgagtcattccggccccggtaattgcacgtccggtggcatccgcaatgtgtaagaaaggcagagtgcaacgactctcaatggcatccgccactttatgcatcgtattggtacatagcacaataccttctgcgcccgcccgctgtaagccaagcgccgcctcagccagaatgtccccggttttatcccattccccgcgacgctggcactcttctatttcatgaaaatcgacgctatgtagcagcacttgcgcagagtgaagcccaccaagccgctgtttaatgccttcatttatcaaacgatagtaaggaatggtggattcccagctcattcctcccagcaaaccaattgttttcattcctctctcctgatgtgtgttaccgcaacaaggctgaataaggaacgagacaaacgcctcaacggccaagtgcccaatctctattaacgaaaaaagggccggatgtacagcacatccggcccgtgaaatcagacgccgatatttctcaacttctcgcctgccatcagtttgcgttcgatatgttccagcgtgacatttttggtttccggaatgagccagaaagtaatgcccacaaacgcaatgttcagcgcagtgtagagccagaacgtaccggcagcgccaatgctatcaagcagtgtcaggaaggtcgcgccgataatcatattgctcacccagttcgtggtggtgctacaggtaataccgaaatcgcggcatttcagcggctgaatttcagagcacaggatccacaccactggcgcggcgctcatcgcataaccggcaatacacatcatcgtcatgccaacagagagccaggacaagccactggaagccgtaccgttatcaaactgcatcaggcaatagcccagcaccagagtgcctaacgccatcacgctgaaaccaattttcagagccggtttacgccctgctttatctaccgtaaacaccgcaataaaggtggcgaacataaaggtcagccctacgaccagagtcgcaatcatctgttgttctgtggtcgtaaagcccgccattttgaagatacgcggcgcgtagtacatgatgatgttcataccggtaaactgctgcatcgcctgcaacaacataccgagaaacacagcacgacggacgttacggttgatcttaaacagtgcccaaccgccctgttttaacttcaggctttcacgaatttcgttgagttcttctcgcgctttttcgctcgtatcgcgcagcatacgcaatacttcttccgcctcaatatgacgccccttttccgccagccagcgcgggctatttggcaggaagactaccagaataatcagcagaactgctggtaaagcaagaacccccaacattgcgcgccagttaccgctataactgaacgctgtatcggataaaaacgccagcacgatgccgagtgtgaccatcaactggtacatactgatcatcttaccgcgaacgttttcacttgccatttcagaaagatacagaggagcggtgtaagacgcgatcccgacagcaatgcccagcaccacacgagcggcgattaacatctctacgctggtcgcaaaagcggaccctatagaaccgagtacaaacaggatggcccccgccatcaggctgtatttacgccccaggcggaagctcagccaaccattaaacagcgcaccaattgctgcaccgagcatcatgctactaaccacccattcctgcaaacgactggtcagcacaaagtgatcggtaatgaacggcaacgctccggcgattacgccgatatcaagaccaaataacaatcctgcgaccgcagcagctacgctaacaaacatattcatacgccgcgtatcccgcaaagaacgtggcgttaaagcagattccgtattgatagtaaccattttttcctgccagcagagagtaagacatagtgaaaaaatacgtgaacaactcacgcaggtgtcaggtcggaaacagcataaatatggattaaattgctgcgacatgtcgttatgtgatggatattccaattttcaaattaagttgaattattgagattattattaaccacctaattttacagcagataaaattcataaagttcattaattgataattaatatggattatttcataaccatgatatggattatgatgatctacaggtataaaaaaccctgccatgcggcagggtcataaaagtaagaagaatgaattaacgcgccagccaaccgccatccacggcaatggtataaccattcacataatcactagcgctggaggcaaggaacactatcggccccatcaggtcactcggcagtccccaacgaccagctggaatgcggtcgagaatttccgcgctacgttgttcatctgcccgtagttgttgagtattgttggtcgccatgtaacccggggctatcgcattaacattaatgttgtgtttagcccattcgttcgccatcaatcgcgtcacacccatcacgccgcttttacttgcggtataagaaggcacacggatcccgccctggaaggagagcatactcgcgatattgataatcttgccgccattgccttgcgcgataaagtgtttcgccgctgcctgagacatgaagaatacgctcttgatattcaggttcatgacatcgtcccagtccttttcgctgaactcgagagcatcttcgcggcgaatcaatccggcgttattcaccaggatatcaatatgaccaaactccgctaccgcgcgatccagcagtgctggaataccatcaatctttcgcagatcggcggtcaggcttaaaaaacgacgccccagcgctgtgacctgctcgatggtttcagtcggttcaacgatgttaatgccaacaatgtcacagcccgcttgcgccagccccaacgccatcccctgacccagtccagtatcacaaccagtgacgaccgcaactttaccttcgagagaaaatgcacttaaaatcataacaataccttattcgtttatgcccacaattagcgcaaatctttaacggccacatggtccatatcatcaaagacctggttttcaccgaccatgccccagataaaggtataagctttggttccgacaccggaatggatgctccagctcggggagatcaccgcctgctcgttatgcatcacaatatgacgcgtttcttgcggctgccccatcatgtggaaaacgcaggcgtcatcatccatattgaaatagaaataaacttccatccggcgctcgtgggtgtgacacggcatggtgttccacaagttacccggagccagctccgtcagccccatactcaattggcaggtttccagtacatccgggacaaaatatttgttaatcgtgcgacggttactggtgaggttatcgcctaacgtgactggagatacttcgtccggtgtgacttttttggtgggatacgtcgtatgcgcgggtgcgcaattgtaataaaacttcgccggagtgccggtatcaatactggcaaagacaacttcttttgcacctttaccaacatacagggcgtcgcggtgaccgatttcatagcattggccatcgacagtaatcgtaccggcaccgccaatattgataacacctaactcgcgacgttcaaggaaatagcttacgccgagttgtttaccaacttccccgccaacggaaaccgttttagttatcggcataatgccgccaacaataattcggtcaatgtggctgtaaaccatggtgtactcatcggcgacaaataccttttcaaccaaaaattcattgcgcagcccttgggtatccagcgtttttgcgtgcgcactgtggatgctctgtcttacgtccacatcaacctccgataatcagtgaagcgtgaaaatagaaaacgatagtgaaacactgtttcgttttctctataaagggatgatatgcccatgggctagggttttcaattaaaaataaaacaatgtttcatttttaagttaaggattaaaaaaagtgcagtgtcgatcacgaatatgtcatgagaatggaaaaatgagggagcccagaaaatgtatgtcgacttgccagccatcattattcaacagattaatgacggcagatatttatcggtaaggaggaaatgcagagttattcgtcacgttcaatggtcaatgccacaccctggcccccgccgatacaaagcgttgccagtcctttgcgggcattacgtttcaccatttcatgaaccagagaaaccaggattcggcaaccggaagcgcctatcgggtgaccgagtgcgatcgcgccaccattgacattgacccgacgctcatcccactcaagcatcttgccaacgctaagcgcctgtgcagcaaacgcttcattagcctcgataagatcgacttcagccaactgccagcctacacgctccaggcaacggcgggtcgcatacaccggcgcaattcccatcaatgccggatctacaccaacgctggcaaatgcgcgaatgcgggccagcacgggtaaattcaacgctcgtgctttggcttcgctcatcatcattaccgcagctgcgccatcgtttatggaacttgcattacccgctgtcacagaaccgagactatcaaaactaggatttaaacgggctaagccttctgcgctggcgtcagtgcgtggctgttcatcggtatcaacaaccaacgtctgcccgttactttgggtcattaccgggacgatctcatctttaaatcgtccggcgtcaatcgccgctcgcgctttttgttggctgctaagtgcgtaagcatcctgcaactgacggctgatgccatattcgcgagccagattttcggcggtgacaccaatatgataatcattgaaggcatcccacaacccatcatgcacaagactgtcaaccaactggctattgccaagctgtgcaccggtgcggctatcagtcagaacatgtggtgcgcggctcatgttttcctggccaccggcgatgacaatatcagcctcgccacactgtatcgcctgagtagccagatgcagtgctttaagcccggaaccgcaaacgtcattaatagtgattgcagaaacgctattaggcagaccacctttaatagcgctttgccttgccggattctgccctgcccctgcagtcaacacctgaccaagaattacttcatccaccgcatatgcaggaacgccggtacgttctattaacgctttcacgaccagactaccaagttccacggcggaatgacccgctaacgcaccacgaaagcagccgataggtgtccgtaacgccccgacaatcacaacgtctttcatcacaacctcgcaccaattaacagtgcaatagtaaatgattgttaattacagttatcttaattgtttaaaaaaagtgatttttatcacaaaggaaatatgcctgagcagcagtcagagacataactggcacgtaaggtttgcaaccactaacccaccaatagaggggtagatagggcgttaatctcccatacttaacctggtttatggtaaattgccctccattttgtttaatttgtagatgatacgttcagataatgtctaatatttggtctaaagaagaaactctgtggagtttcgcgctctacggcacagccgttggtgcaggcacgctcttccttcctattcagttaggtagcgcaggggctgtggtcctgtttattactgctctggtcgcctggcctttaacatattggccacataaagccttgtgccagttcatcctcagtagtaaaacaagtgcaggtgaagggataacgggcgcggtaacacactactatggcaagaagattggtaatctgattaccacgctgtacttcatcgccttttttgtcgtcgtgttgatatatgcagtggcaattaccaacagtcttacggaacagctggcaaagcatatggttattgatcttcgcatccgtatgttggtgagtctgggtgttgtattaattctgaatctcatttttctgatgggacgtcatgccactattcgggtaatgggatttttggtattcccattgattgcctatttcttatttctttccatttaccttgtcggtagttggcaacctgatctattaacaacccaggtagagttcaatcagaatacccttcaccagatatggataagcattcccgtgatggttttcgcctttagccatacgcccattatttctacgtttgccatagacagacgtgaaaaatatggcgaacacgctatggataaatgcaaaaaaattatgaaagtcgcttatctcatcatctgcataagtgtactgttctttgtctttagctgcctgctttctattccacctagctatattgaagctgctaaagaagaaggggtcaccattttaagcgcgctttctatgctgccgaacgccccagcatggttgagtatttccgggattattgtcgcagtagttgcgatgagcaaaagtttcctgggtacgtactttggcgttattgaaggtgccacagaggtcgtcaaaacaacactacagcaggttggtgtaaagaaaagtcgtgcatttaaccgcgcactaagtattatgttggtaagcctgattaccttcattgtttgttgcattaacccgaacgcgattagcatgatttacgcgatcagcggcccgctcattgccatgatacttttcatcatgcctacgctgagtacgtatctcatcccggcgcttaaaccctggcgttccatcggaaatctgattacgctgatcgtgggtatcctgtgcgtaagcgtaatgttctttagctaatatcagttgtggatggttcaaaattgctacaattttgaaccattccatttttcataatattcatttgttattattccaccctatcacttctctcgtcatatcctagtattatcagttagttaaacacacaaagagatctgaacatcttaaataagactatttaagatgcataacttagattcgcaagatatcttctggtcattcaaaaacaatttgcgatatagatattcttataccatgagatagttatctggaccgctctcaaccatgcaagattaaatcagtgaaacataatcatatttgataacgagaaatgcatttttaaatgccttactcagaattatagcaaatacagattaatcgcaatttttcccggcaaaattacaaaatcatggtgtattgacatcatcaataaccaatgaaattatgcaattatatacggatagggaggttcttaacatggggctttgtagtcgttataaaagtcttacatgcaatagttgcagtatgcattgccaaataatgccagaagagagtccgcgtttgcagtattgcgcaaacagctgtttttgtatgtggcccgaagaaagtagttattttaatcgtggtgtggtagaaggtatcttaacaaaaaaccacaatgcgagattaagcggatatatttttgtcgattttagtgtaagttttttacgtctattccttgaaaaagactggattgactatcttgcaagtactgacatggggattgttttagtcagcgaccgcaatatgcaaagcttagctaattactggcgaaaacacaacagtgcaatatctgctgtcatatataatgatgatggtcttgatgttgccaatgaaaagatcagacaactatttattggtcgttatttaagttttaccggaggtaacacattaactcagatggaattcaccataatggggtatatggtttctggttataatccatatcagattgctgaagttctggatatggatatccgtagcatctacgcgtacaagcaacgaatcgaaaagagaatgggtggtaaaataaacgaattatttattcgtagtcatagcgtccaacattgatactcaacgaccagccagaatcatactctgtttatacgggcatttattgaaatgtccgtattttataaataggccgtcccctcaagagtaaacaccatagtatttaaaaccatcacacgaaaaattcagaagcattacgaaatatgaatttacaaacaatagtggcataaatgttaaccatgttaatttacgtaaagttttacgttgcaacattaaagcctcatttcaatcatcatgataaatataaaattaatatatatttatgccgtaaataccaatatacttagcaaactatgtgatctccatttcgattgatttagtgtttattgacgtatgtactggattattaacgataatatcgagttctggcctgagcaccgaaaattaataagcgtacataacgccgatcttaacgtcgttctgacaacgccagccagtcgatgtttaagtcttctacttgaagcttttcctgatgtggttgcacaacaagattttttcaccagagtctgggaagaagaaggtatgcgtgtgcctactaacacgttatatcagaacatatccattatcagacgcggatttcgcgctgttggtgatactacccacagcctaattgcaaccgtgccgagaagaggattcaagatccataatgacattaacatacaaaatcatgtaataaacagcagtacagacgcacatacacacaatgccccacctgccataaaagttaatgcgggatacaaagagagcattggtggcgcaaagaatttcaataacaaaatcctcaaacatataaaaagtcatctaattatgttgagcgcatttgtcataggcgcatattctgcatattggctatggaataataatcaaccgaagccatttttcaaggattacaagactgttgcggaaattaatggctgccattttaatgtaacagaagatacaattgatgggttgaaagagttcgataaatataaaacacggatactggatagcgggattaactgtaaaaaacatccgtggttatacttccctcttgcaaaatccagtccggggatgattgttatggcatgcaataaaaactataaccaacatgaagtggcaaactgtttaaccctgtcttaccgtgaggttaatcgtgattgattataaaaaaaacttattatttattttagtttttatcagtgggtttattctcttcactgtctattcttacactgcagaaaaaatgatatataacgaaacatgcactgcaaattgggtaatttttaatgaccagggacgagcaaatcttaccatcgactttatgtataacaaaaaaaataaaacaggaactgttgcgttgagtggaacctggcaacaaggtaacagagaaagtaaaagtatacggcgaaatattgaatacacatggattgaaaactatgacacagcccatttaacaagtaagaaagttaataagtttgagattatggatcaagttgatgatgatagacttgcacaacttattcctgatttttatgtctttccagaaaaaagtgtaagctataatatactaaagcaaggtaagcatgcttttattttgagcattggtaacagagcaataatgcattgtgcaaggtaaactaaaatagataacaaaaagatggaacctcgttaatcataaaacaataaaattaaatattctcgcagtatatggcagtctaaagcatcaaagatttgatcaacatctttcattttagacatctccttgcaatgtaaaatatcatgtatcaacaacatctggtgcaaatccaactgtcgaactcgacattcatcttagctcgattattattccttcgtacagtgcttgtaaacaatacagaaagaggattattaagaaccagtttactcagactatcaatagaggaaaggactaacgtttctttaaaagaattgatttcatcatctgttaaactaaactcatcattgacagatcgactgatataactgtttttaactttactctttacgttgactttattgacagaattaacattcacatatctactatttaatgtccaacttgttgtttgcgtgagaacattctcagcattaaggaatttttttaacggaatccttggtttctttttgctgtcgctatttacaatatcatgcatatagaccatttcatgaatctggctaaattcaatgtccattgtatacctcacatttttaccgtgactcgatgttactgttcaataatcaccttccatcaatactaaaattaatacccctaatgtgccgataacaaatatagtcattctacgtaacgtctccataaggtgatatttgacattatcagaagctgcgaattcggattttgctctaatcaaatgagagaaatgtaaaatgaagccacgaaatattaataatagcctaccactgcaaccattagttcctgatcaggagaacaaaaataagaaaaatgaagagaaatccgttaatccagttaaaatcacaatggggtctggtttaaattatattgaacaagaatctcttggaggaaaatatctaacacatgatttgagtataaagatagcggatatttctgaagagataattcagcaagcaatattatctgctatgagcatatataaatttagcataacagatgatttaatgagtatggctgtaaatgaactcataaaactgaccaaaatagagaataatgtagacctgaataaattcactactatatgcacagacgttctatccccccgcgtcaccagacataataaagaaaaaaacaaacgacattctacccttctcaaaaatcccctttttaattttcattgaaaaaatggcaattgatactatgaatccaggtcatacacattaaggcatttatgtaatgtcgtaattaagataactaataaggtgaatattagtaaaacaactaatgatgttattagtttgtagtgaacagtacttttaccaataatgaaaaatataccataagcaatgcaagcttaaaactcataatttaaaaaagataaatataaaaatatcaatgagtcaatcaataataatttggcatcacgagacacatcacagaggaatattatgagcacagaaacaattgaaatattcaataatagtgatgaatgggcaaatcaactaaaacacgcattaagcaaaggagaaaatctggcattactacatggtttaactcctgatatccttgatagaatatatgcatatgcattcgactaccatgaaaagggtaatataacggacgcagaaatttattataaattcttgtgcatttatgcgttcgaaaatcatgagtatctaaaagattttgcaagtgtatgtcagcccaaaaagaaatatcaacaagcatatgacctttacaaactaagttacaattacttcccgtatgatgactatagtgttatttatcgtatgggtcaatgtcagattggggctaaaaatatcgataacgcaatgcaatgtttctatcacattattaacaattgtgaggatgatagtgttaagagtaaagcgcaggcatatattgaactcttaaacgataatagtgaagataatggctaagcattacaatcatttggttaaatttgctggttatagtgcagttaaccactataaccagcacctcttatgttttcttaaatcagcatcttaaaacagttaagagcatactataaatcattatttttcaatgcgttagagaacaatctactttatcaaaattgaataaggctatttcagattacatcactgaattcctaagataaattagtgaacacaaccatagatatgtcaaatgtaatttcctgtagcgttaatgacacataaatatgaatagccataatttctattgcttaagcaggatgcaagaaaccaattttttcatagaggttaactaatggacttagaaaataaattcagttatcattttcttgagggattaacgctcacggaagatggaattcttactcaaggaaatgagcaagtttatattccacagaaagagttaggtgtattaatagtattacttgaatccgctggtcatgttgtactgaaagatatgatcatcgaaagtgtatggaaaaatattattgttagtgacgagtccctgacaagatgtatctattctttgcgctgcatttttgaaaaaattggctatgatcgttgcatagaaacaatctaccggaaaggttatcgtttcagcgggcaggttttcaaaactaaaattaatgaagataatactagtgactattccatagctatattccctttcactactagtttgaatacactggatccattaatacttaatcaggaattagtgcaaatcattagtaataaaaaaatcgatggtctctatacctatccgatggctgcgacaaatttttgtaatgatcacatatctcaaaatagtttcttgagcagattcaagccagattatttcgttacaggaagaataaaccagaataatgcagtgaacactttatacattgagttgatcgacgctaaaaaccttttcctcatcgccagtaatcatctccctgttgatgaactacataatacaagtcaatttattatagataatatccttcaaacggtacataaaccagaacgatctgtaagattagctaagcaggaccaaggatataagaatcattatttaagtgatgaaatgttagccggaaagaaagaactttacgacttcacccctgaaagcatttacagggccatgactatatttgatagattacaaaataaaagtgatatacagacgctaaaaacagaatgttattgccttctagcggaatgccatatgtctttggcacttcatggaaaaagtgaacttgaacttgctgctcaaaaagcattagagcttttagattatgtaagtgacataaccactgtcgatggaaaaattttagctattatgggactgataactggtctgtctggacaagcaaaagtatctcatatcttatttgaacaggctaagatacacagtactgatatagcctctctctactactatagggcactagtccactttcataatgaaaaaattgaagaggcaaggatttgtatagacaaaagtctacaactcgaacccagaagacgaaaagcagttgtgataaaagaatgtgtagatatgtatgtgcctaacccgctcaaaaacaacattaaactctactataaagaaactgagagtgaaagccatcgagttataattgacaacattttgaaattaaagcagctgacgagaatttgtatgcgataaatttttattgacgcaattttattatttagatgtatgcaacttgttatttaaacaacagagataaaaatatctaagatattcaccttattgcaagatatttaaaatgctctagagttaaaagtatgatgtaaagaccattggcctggacaattaaaaaagggagctttatgactaatccaatcggtatcaataatttatctcaaagtagtaatatagcgaatgcaacgggtgatgaagtcgtaagtttagataaacacatcaacaccagtgctactgatacagatcaaatacaagcatttatagttagtacatggatggcgccttttcaaaatgatatgtatagtgaagataatcctatcagtccttactataaaattgagtggtaaacgattgaccaaataaatcataacgagatacttttataatagtatctcgttcctttcattcaatcctcacacatgaaaaaatatgcgctcaccaaaagttaaattcttaaccatcttcacgttttgtatatttattacaaaaatgtctttcgccagcaactcttgctctaatgaagcaggaacaatgttcagaatcgaaccaaatttaattaaagctatcgctcttgttgaaagcaatctaaaaaaggatagcataggcaagaacagagataagaataacaatataaagagtttagattattggttaatgcagataaaccagatgcatattcccctgttaaaaaaacgtggaataataaaagatgaacgagatttgttagataacccttgtctgaacattaaaataggaaccgagattttatataaccattttagtcgttgtggagtaacgtggcaatgcctggggacttataatgcgggttttgcaatggataaccaaaaaaagagacagcaatatgccccaaaatatatattgtatataccaggcttaatgaactaaacaatcgtaaggcttcagcaaaatgagcctaaagcctcttttttttatatagtgcaaacacccatacgtaaagctgttttgatcaactcgataccactgtgaacatctaatttcttcatgatattgagtctatgagtttcgactgttttcctgcttaactgcaagaaattagcgatttctttgtttgttttaccatcagctatgagttgtaatatttcactctcacgatttgtaagttgattatcagaggaatacctggaagatattttttcacaatccatatgtacactatcaaaataagtgtaaccattactaatgctatcaatagcacgatttagtttcgccgggtgactggttttccatacgcatcctttcgcacctgcttcaagcaattttatactatcaatatacggcatctttgctacaaatgtaataatatgagcatctatcttatggcttttaacccattttacgagttcggcccccatcattccacctgcaaattctcctaaaataaatatttaggctgtagatttgttacactccgctatagctttcttcagatctttatagcccacttatttaacaacttgaaaataaggtgttttacctgggttgttacaaaaggattgcattgcgtaaacgctttttatttacaacaaaatggggaagtattacggcgaagataaattggagcgggcgaagggaatcgaaccctcgtatagagcttgggaagctctcgttctaccattgaactacgcccgcttcgagatgcgtaaggcattataaaccttacgctctccttagcaagtgccacgctgctgactgctgattaattcgccatcagcattttggcttgctgccctgaggcggcaagtaacgtagcggatcaattgccgttgcacggtaacgaatctggaaatgcaggcgaacagatgccgcatccgtgctccccatagtggcgattttttgcccagccttcacgctttgcccattatttaccagcatcgtgtcattatgggcgtaagccgtaatgtaatcttcactgtgtttaatcatgatgagattaccgtagccacgcagctggttgcccacatacaccacctttcctgcacccgcggcgtaaataggtgtaccccgtggagcactgatatcaatccctttattgccgccatctgctgtgctatacggcatgataactttccctgtcgttggccataaccaacaacgttgccctactggcggccaggaacttttcggtaccgcactactcggtgtaacgcttgcggttttggtcgtacttttggcggtacttttacgtgtaatactgctacttttcgccccacccagttttagtttctgaccaacttcaatggtgtaagggggggaaatgccgttcagtcgcgccagttcttttacgctggttcccgtggtgcggctaatacgatatagcgtatccccccgtttcacggtgtaaacggagccggaatacgttcctgtatcggaacttttgctaccgctacagcccgccaaaagcagtccaacgcttaacaacatcacgatacccagagattttttattcaggcgtcccgcactcaaaatctttcctcgcttaaaaaacaagacgccttatcatagcagccagcctcttgatacccaatctcttgcttctggaaaaacgtggtaatagagaaagaggttaatttcatttggcaaagggaagtatcatcagcaaaatattcgctgtagaggtatcgaacttcctgactttttaccctatttcccatcctgatgcgtaataatcccaatttatcacattgattttatcgccactcatattgatacgtatcactgcccctattcagagtcctgtttcgtatcatatctgtgtttttttaacgtcatcacacttcctacctcccctaacgcttatcgtcgtttctggcgtaaatcttgcctgcttagactaaatctttgccataagaaccaaatgttcaaatcgaggggatttctatggaagcgcgggaagcaaccgctacgggtgaatcatgcatgcgcgtcgatgccattgctaaggtcaccgggcgggcacgatatactgacgattatgttatggcgggcatgtgttatgcgaaatatgtacgtagccctatcgcacatggttatgccgtaagtattaatgatgaacaagccagaagtttgccgggcgtactggcgatttttacctgggaagatgtgcctgatattccattcgctacagctgggcatgcctggacacttgacgaaaacaagcgcgataccgccgatcgcgcactgctaactcgccatgttcgtcatcatggtgacgccgttgccatcgtcgtggcccgcgatgaactcacggcagaaaaagcggcgcaattggtcagcattgagtggcaagaattacccgttatcaccacgccagaagcggcgctggcagaagacgctgcaccaatccataacggtggcaatttactgaaacaaagcacgatgagcacgggtaatgtccaacaaacaatcgatgccgccgactaccaggtacaggggcactatcagacccccgttattcaacattgtcacatggaaagcgtaacaagcctggcgtggatggaggatgacagccgaattaccatcgtttccagcacccagatcccgcacattgttcgccgcgtggttggtcaggcgctggatattccctggagttgcgtacgagtcatcaaaccatttgtcggtggcggttttggtaataaacaggatgtactggaagagccaatggcggcattcctgaccagcaagcttggcggcattccggtgaaagtttcccttagccgtgaagagtgtttcctcgcaacccgtacccgccacgcttttaccattgacgggcaaatgggcgtgaaccgcgacggaacattgaaaggttatagtctggatgttctgtctaacaccggcgcttatgcatctcacgggcactccatcgcttctgcgggggggaataaagtcgcttacctttatcctcgttgtgcctacgcttacagtagtaagacctgctataccaacctccccagcgctggtgcgatgcgtggttatggcgcgccacaagtcgtatttgccgttgagtctatgcttgatgacgccgcgacagcgttaggtattgatcctgttgaaattcgtttacgcaacgccgcccgcgaaggagatgctaatccgctcacgggcaaacgtatttacagcgcagggttgccggagtgtcttgaaaaaggccggaaaatctttgaatgggaaaaacgccgtgcagaatgccagaaccagcaaggcaatttgcgccgcggcgttggcgtcgcctgttttagctacacctctaacacctggcctgtcggcgtagaaatagcaggcgcgcgccttctgatgaatcaggatggaaccatcaacgtgcaaagcggcgcgacggaaatcggtcagggtgccgacaccgtcttcagccaaatggtggcagaaaccgtgggggttccggtcagcgacgttcgcgttattagtactcaagataccgacgttacgccgttcgatcccggcgcatttgccagtcgccagagctatgttgccgcgcctgcgctgcgcagtgcggcactattattaaaagagaaaatcatcgctcacgccgcagtcatgctacatcagagtgcgatgaatctgaccctgataaaaggccatatcgtgctggttgaacgaccggaagagccgttaatgagcttaaaagatttggcgatggacgctttctaccaccctgaacgcggcgggcagctctctgctgaaagctccatcaaaaccaccactaacccaccggcgtttggctgtacctttgttgatctgacggtcgatattgcgctgtgcaaagtcaccatcaaccgcatcctcaacgttcatgatagtgggcatattcttaatccactgctggcagaaggtcaggtacacggcggaatgggaatgggcattggctgggcgctatttgaagagatgatcatcgatgctaaaagcggcgtggtccgtaaccccaatctgctggattacaaaatgccgaccatgccggatctgccacaactggaaagcgcgttcgtcgaaatcaatgagccgcaatccgcatacggacataagagtctgggtgagccaccaataattcctgttgccgctgctattcgtaacgcggtgaagatggctaccggtgttgcaatcaatacactgccgctgacgccaaaacggttatatgaagagttccatctggcaggattgatttgaggataacatcatgtttgattttgcttcttaccatcgcgcagcaacccttgccgatgccatcaacctgctggctgacaacccgcaggccaaactgctcgccggtggcactgacgtactgattcagctccaccatcacaatgaccgttatcgccatattgttgatattcataatctggcggagctgcggggaattacgctggcggaagatggcagcctacgtatcggctctgcaacgacatttacccagctaatagaagatcctataactcaacgtcatctcccggcgttatgtgctgcggccacgtccattgctggaccgcagatccgtaacgtcgctacctacggtggaaatatttgcaacggtgccaccagcgcagattctgccacgccaacgctaatttatgacgcgaaactggagatccactccccgcgcggtgttcgtttcgtcccgattaatggctttcacaccgggccgggcaaagtgtctcttgagcatgacgaaatcctcgtcgcctttcattttccgccacagccgaaagaacacgcgggcagcgcgcattttaaatatgccatgcgcgacgcaatggatattagtacgattggctgcgccgcacattgccgactggataacggcaatttcagcgaattacgcctggcatttggtgttgccgcgccaacgccgattcgctgccaacatgccgaacagactgcacaaaatgcgccattaaacctgcaaacgctggaagctatcagcgaatctgtcctgcaagatgtcgccccgcgttctagttggcgggccagtaaagagtttcgtctgcatctcatccagacgatgaccaaaaaagtgattagcgaagccgtcgccgcggcggggggaaaattgcaatgaatcacagcgaaacaattaccatcgaatgcaccattaacgggatgccttttcagcttcacgccgcaccaggcacgccgctcagcgaattactccgcgaacaaggactgctaagtgtcaaacaagggtgctgcgtgggtgaatgtggtgcctgtacggtgttggtcgacggcacagcaatagacagttgcttataccttgccgcctgggctgaaggaaaagagatccgcacgctggaaggtgaagcgaaaggcggaaaactttctcatgttcagcaggcttatgcgaaatccggcgcagtgcagtgcgggttttgtacgcctggcctgattatggctaccacggcaatgctggcgaaaccacgcgagaagccattaaccattacggaaattcgtcgcggactggcgggaaatctttgtcgctgcacggggtatcagatgattgtaaatacagttctggattgcgagaaaacgaagtaaaaggatatccggcctgaattcaggccggattcactgaggttatgtgtttaacaactcatatttcttaatcttgcgatagagcgtagcaatgccgatgcccagttcatcagcaacttgcttcttgctgttatgacgactaagcgcctcgcggatcatttgcttttccatctcctccagcgccgtgccgcccgcatcatcgagactcaggtgcgcctcactgacctctgttacatcactttgctccgttgtgccattattcagcagatttggcggcaatagcgtgctgtcgataacttcaccactaggaaccacgttaaccagatattccatcaaattgcttaactcgcgcaggtttccgggccaacgatgcttacgcaatatttcgacgacatcgggagcaatgccaggataaacgcttcccagacgacgggtatgcagatgtaaaaagtaatgcaccaatagttcaatatcttcctgacgttcacgcagcggtggcagagttatcgggataacattaagtcggtagaagagatcttcgcggaatttaccttcggcaatgaactgggccaaattctgattagttgcagaaatgatgcgaatgtcgacttgtattgggctactggcaccaatcggcagaatttcacgtgcctcaatagcgcgcagtaatttagcctgcaacattaatggcatatcacctatttcatcgagaaacagcgtgcccgtattcgccgcctgaatcaaccctgttttaccgttggcagaagcgccagtaaatgcacctttaacataaccgaacagttcgctctccagaagctgctccggaatcgcggcacagttgatagcaataaagggtttattccgtcttccgctcaacttatggattgcacgggcgacgacttctttacccgtgccgctttcaccaaccaccataacgctggatgggctgggtgcaatacggctaatgagtcgttttaattgccgcataacacggcactcgccaaccaattgttcaatatgcggttcatcaggtgcatttgctacagaaaaactggtatggctttggtgaaacgccattaaaaataattgtcggccctgaatgttatgcaattgaccaatgattaattcacttttatcgtcccaactaacaatatgctgcatatgtccatgggtaaaattactctcaaatgttaatggtctgaaacggataggtttcccaataatattattttgcacaacaccaagtgtttttaaggcagtctgattaacaaactgaacccgattttcatcatctacaactaatacgccctgatccatattatcgatcatggtcgcaaatattttactgatgttatctcctggcccctgatcctccagaagtttgctaacaaaaatggtggatatatggcgaacataatcagaaaattcgcgtaaattatcactgatatgctcttgttgctcgtgggtaacggcaatcaaacttatcaccccaacacaacgatcctgtaaaatgacaggcgtacccagaaatgctttttcgcggcaattttctttactatcgcaaccttcgcaaaggggatcgaagcgagactgtgtcacaactttttcagttttcgtttccaggacgtggcggagcaggcgactgttgccgctcaactggcgaccaagaaacttcccatacgcgcccgttccggcaacgcgacacaagttttcatcaacgatctcaacctcaagctgcaaaaacgctggcaagcattctggcaaaacgctgaattgtcggttgaatttgcatcaatacactctgcgtagtagcaagctccatagctttaccttccagacttacttaaaagtcgatcattgaagacgttgatggttcacagatcatgatgatattaactcaggcgaaattggctttgataaaaacataagatttttatcattttctaatgaaattatggaagagatatcacatttctatatcaatatgagaattacggcggtgagtttatcaaactgaagagagatagcctgcccctttatcttatttctgatacttagcagcaaataaataacgcgataaaaaaagccaaacgttttcgtattttacaaacaaccagaagctggcatcaatttgtgatcaaccccacacattatccgtcaaattagtcttttgcagccgcgcggataattctggcacacttattgttagtcccaggtatagctgtgaaaacaccaatcactttggcaagtcacagtgaaataaaccactttgcctgtcattccactaccgggactttatgatgaaaactgttaatgagctgattaaggatatcaatagcctgacctctcaccttcacgagaaagattttttgttaacgtgggaacagacgccagatgaactgaaacaagtactggacgttgccgcagcattaaaagcactgcgtgctgaaaacatcagtaccaaagtctttaatagtggattaggtatttccgtattccgcgacaactccacccgtacccgcttctcttatgcttccgcgcttaacctgctcggccttgcacaacaagatctcgacgaaggcaaaagtcaaatcgctcacggcgaaaccgtgcgtgaaaccgccaatatgatctccttctgcgccgacgctattggtattcgcgacgatatgtatctgggcgcaggcaacgcctatatgcgtgaagttggcgctgcacttgatgacggttacaagcagggtgtactgccacagcgtccggctttagtgaacctgcaatgcgatattgaccacccgactcagagtatggctgacctcgcgtggttacgtgaacactttggtagtctggaaaacctgaaaggtaaaaaaatcgccatgacctgggcctactctccaagctatggcaaaccgctctctgtaccacaaggcatcatcggtctgatgactcgcttcggtatggatgtcaccctggcccatccggaaggctacgacctgatcccggatgtggttgaagtggcgaaaaacaatgctaaagcctccggtggtagcttccgtcaggtcaccagcatggaagaagccttcaaagacgcagacatcgtttatccgaagagttgggcaccttacaaagtgatggaagagcgtactgaattgctgcgtgcgaacgatcacgaaggcttaaaagcactggaaaaacagtgtctggcacagaacgcgcaacacaaagactggcattgtactgaagagatgatggaactgacccgtgatggcgaagccctgtacatgcactgcctgccagctgatatcagcggcgtatcctgtaaagaaggtgaagtgactgaaggcgtattcgaaaaataccgtatcgctacctacaaagaagccagctggaagccttatatcatcgccgcgatgatcctgtcccgtaaatacgccaaaccaggtgcactgctcgagcaactgctgaaagaagcgcaagaacgcgtgaaataacccctcgggccgatcagctggtcggccctctatttccagaggccaaaaggataggatatgtccgttttcagtttgaagattgatatcgccgataacaaatttttcaacggcgaaacaagtccgctctttagccaaagccaggccaaactggcgcgccagttccaccagaaaatagctggttatcgcccaacaccgctttgtgcgctggacgatctcgcaaacctttttggtgtgaagaaaattctcgtcaaagacgaaagtaaacgattcggtctgaacgccttcaaaatgcttggcggtgcgtacgccatcgctcaattattgtgtgaaaaatatcatcttgatatcgaaacgctgagttttgagcacctgaaaaatgccatcggcgaaaaaatgactttcgcgaccaccaccgacggcaaccacgggcgcggtgtggcgtgggcagcacagcaactcggacagaatgcggtgatttacatgccgaaaggttctgctcaggaacgcgttgacgccattctgaacctcggtgccgagtgcatcgtcacggatatgaactatgacgataccgttcgcctgaccatgcaacacgcgcagcagcacggctgggaagtggtacaggacacggcatgggaaggttacaccaaaatcccaacctggatcatgcaaggctacgcaaccctggcagatgaagccgtcgagcaaatgcgtgaaatgggcgtaaccccgacgcacgttctgctgcaagccggtgtcggagcaatggccggtggtgtgctgggttatctggtcgacgtctatagcccgcaaaatctgcacagcattattgttgaacctgacaaagctgactgtatttatcgctccggcgtcaaaggcgacatcgtcaacgttggcggtgatatggccaccatcatggcaggcctggcctgtggcgaacctaacccgctgggctgggaaatcctacgtaactgcgccacccaattcatctcctgccaggacagcgttgccgcattaggtatgcgcgtgctgggtaatccgtacggcaacgacccgcgcatcatctccggtgaatccggcgctgtcggtttgggcgttctcgcagcggttcattatcacccgcaacgtcaaagcctgatggaaaaactggcgctgaacaaagatgccgtggtgctggttatcagcactgaaggcgacaccgacgtgaagcactaccgcgaagttgtctgggaaggcaaacacgctgtagcaccttaatcaccctattggaactgctccctgcaaaacggggagtaaaaaatctggagaaaaataatggctaagaatattccattcaaactgattcttgaaaaagcaaaagattaccaggcggatatgactcgcttcctgcgcgacatggttgctattcccagtgaaagctgcgacgagaaacgcgtagtacatcgtattaaagaagagatggaaaaagtcggcttcgataaagttgaaatcgacccgatgggcaacgttctcggttatatcggccacggcccgcgtctggtggcaatggacgctcatatcgataccgtcggcattggcaacatcaaaaactgggacttcgatccgtacgaaggcatggaaactgatgaactgattggtggtcgcggtacttccgaccaggaaggtggcatggcctctatggtttatgccggtaaaatcattaaagacctcggtctggaagatgaatataccctgctggttaccggtacggtgcaggaagaagactgcgacggtctgtgctggcagtacattattgaacaatccggcattcgcccggaatttgtggtcagtaccgaaccaaccgactgccaggtataccgtggtcagcgcggtcgtatggaaattcgtattgatgttcagggtgttagctgccacggttctgcaccagaacgcggtgataacgccattttcaaaatgggtccgattcttggcgaattacaagaactctcccaacgtctgggttatgacgaattcctcggcaaaggcaccctcaccgtttctgaaatcttcttcacatccccaagccgttgcgctgtagcagacagctgcgcagttagtatcgaccgtcgtctgacccggggcgaaacctgggaaggcgcgctggacgaaatccgcgccctgcctgcagtacagaaagctaacgcggttgtttctatgtacaactacgaccgtccgtcctggactggcctggtttacccaaccgaatgctacttcccgacctggaaagtggaagaagatcacttcaccgttaaagcactggtgaatgcctacgaagggctgtttggcaaagcgccggttgttgataagtggaccttcagtactaacggcgtatctatcatgggccgtcacggcattccggtgatcggctttggcccgggtaaagaacctgaagcgcatgcacctaacgaaaaaacctggaaatctcacctggtgacctgtgccgcgatgtacgctgcaatcccgttaagctggctggcaacagagtaattactcttcacttattcccctccggttcgccggagggtttttggagtttgctatgcgcgtattgatcaaaaacggcactgtcgttaacgcagatggacaagccaaacaggatttgctgattgaaagcgggattgttcgccagttgggcaacaatattagcccgcagctcccgtatgaagaaattgatgccactggctgttacgttttccctggcggcgtggatgtccatacgcatttcaatattgatgtcggcatcgcgcgcagttgtgatgatttttttaccggtacccgcgcagctgcgtgtggcggtacaacaaccattattgaccatatgggatttggcccaaacggctgtcggttacgccatcaactggaggtttatcgtggttatgccgcccataaagcggtcatcgattacagctttcacggtgtgatccagcacattaatcacgcaatcctcgacgaaatcccgatgatagtcgaggaaggactgagcagttttaaactctatttaacctatcaatacaaactcaacgatgacgaggttttgcaggcattacgccgcttgcatgaatccggcgcgctgaccaccgtgcacccggaaaatgatgcggctatcgccagcaagcgggcggaatttatcgccgcagggttaaccgcgccgcgctatcatgccttgagtcgccctctggaatgcgaagcggaagccatcgcccgcatgattaacctggcacaaattgccggtaacgccccgctctatatcgtgcacctgtctaacggcttaggtctggattatctgcgtcttgcccgtgcgaatcaccagccagtctgggttgaaacctgcccacaatatctcctgttggacgaacgcagttacgatacagaagatggcatgaagttcattcttagcccaccgctgcgtaacgtacgcgagcaggacaaactgtggtgtggcatcagcgatggtgcgattgacgtggtggcaaccgatcactgcaccttcagcatggctcaacgcctgcaaatttctaaaggcgatttcagtcgctgcccaaatggcttacccggtgtggaaaaccgcatgcagttactgttttccagtggcgtgatgacgggacgtataacaccggaacgctttgttgaattaaccagcgcaatgcccgccaggttgtttggcctgtggccgcaaaaaggattattagcgcccggttccgacggcgacgtggtgattatcgacccacgtcagagccaacaaattcagcatcgccatctccacgacaacgccgactacagcccatgggagggttttacctgtcagggcgcgattgtcagaaccttatcccgtggtgaaacgattttctgtgacggcacctttacaggcaaagccgggcgaggtcgtttcctgcgacgcaaaccgtttgtccctcccgtgctctaaccactgccagggatctatacacaatcaagaatgatgagtgaggaaaaatgagtaagaaaattgttctcgccctgggcgggaatgcgctgggcgatgacctggccgggcaaatgaaagcggtaaaaattacttctcaggcaattgttgatttaattgcccagggacatgaagttatcgtcactcatggtaacgggccgcaggtgggcatgattaaccaggcctttgaagctgccgcaaaaactgaagcgcacagcccaatgctgccgatgtctgtctgtgttgcattaagccagggttatattggttacgatctacaaaacgctttaagagaagaactgctttctcggggcattaataaacctgtagcaacgctggttactcaggtcgaagtcgacgctaacgatccggcattcctcaacccgaccaagccgatcggtagcttctttaccgagcaagaagcagagcaactgacaaaacagggttacactctgaaagaagatgctggtcgcggctatcgccgtgttgttgccagcccaaaaccggttgatatcattgaaaaagaaacggttaaagctctggtagatgcaggtcaggtggtgatcaccgttggcggtggtggtatccctgttattcgtgaaggtaaccatctgcgtggtgccagcgcggttatcgataaagactgggccagcgcccgtttagcagaaatgattgatgccgatatgctgatcattctgactgcggtagaaaaagtggccattaacttcggtaaagagaatgaacagtggctcgatcgcctgagtttaagtgatgctgaacgctttatcgaagaaggtcattttgcgaaaggttctatgctgcctaaagtggaagctgccgccagctttgctcgctctcgcgcaggtcgtgaagcactgattaccgtattgagcaaagcgaaagaagggattgaaggcaaaacaggaacggtgatttgtcagtaatttaaaggccgggtgggtaataccatccggccaaagattgtcaagtaagtgcgctttgttgatgccggatgcggcgcgagcgccttatccgtcctacaaaacatcgcaaattcaatagattgcaatgcacttgtaggcctgataagcgtagcgcatcaggcaatttggcgtttgtcatcagtctcaggccgggtgggtaataccatccggccattttcatttaagccacttccagcacttcttttgtcgctttcacgccctgatgcatcaacatcattaacgcctcaagtacgccgccgccaatcgcccgggctttatcagaaacgctggtgaaatcagcggtttcaccacgaggatcgatatcaccaattttaaaaccaccaaccactgccaggccgtcgttcaacaagccacgcaccatccccgtcaacggtgctttaatttcatgctcaccaatccaggcaatcacatcgccctctttcaccagatcgcctaatttcacgttggatcgcataatgcctgcagcaggagcacggatcacccgtcgggtggtatgccccataatattgccaggaacaccggtattctcctgcgcacaaccagagtaaatcacctgaccgagccagtgcccgcgatttgtttcaattaccgcatgacaatccttcccagcagtaaagcccggcccaagcgcgattgttactggtgccatatctgcccgcgttcccaaattctgtttcgccagaatagcgtccaccacgcaaagcggtttcagttcatcaagcaaactacaggcgggatctaccatcacaggaatgaatccgcgttcggtaagtttcatcgcttccgcagagctggttgccaggcgagcagtgacgccttcgaccgtcatttcgccatcgaacacggcctgggcaaacgccacggtacaacgaatcactgtcggtttttccacttccagcatgatcactttaaaacccgcatgatacagacgtagcgccacaccactggcgatatctcccgcaccgcgaatcaccaccagctggtgtccggaaggatgagaaggtttcatcatcagcccacccggcgcgttatttttcacctgtaatatttctgccagcacgctgatggcgatctcctgcggcgtttccgcacctatgttgtaaccaacgggcgcatgtaaacgggcaatatgttcttcagccacgcctttctcacgcaattgacgcaggaaaagctgaaccttgcgacgacttgccagcaaccccaaccatgcaatgggctgttcaatgagtttgtcgagggcttcacgatcctgattattcgtggcaatcaggacaaaattatcagggcgaatatccagtgcttccactgccgcaccaaagctctcagcatggagaagcgtggtacttggtgggaatagttcaggattgaggctttcgcgataaatatcagcaacggcaatatcaaatcctaatagcgccgcactctgggctatcgcccggttgacatgccccgcgccaatcaacaccagacgtggacgcataccatggacgctgataaatacactcattgcacctccacaatcactcccgacagcatccgcaccgttacgagccatacgtccatggaataatcgcggcttacgttcctgcaatgcctgaaggctctcttcaatcaccttccgctcaaccattccgccaccaattgtaccgacgatagaaccatcggcgcgcactaacatttgtgcagaatggcggggagtgctgcctcggctatcaacaatttgcgccatagcaaacggacaattttgctcttcgagttttgcagcctctgtgaaaatattcataccaacctcaatggatatcctttcagtaacccggaatacccgggccgttaattcacaaatctgcgcgcgattgcaggatgttcttgtatatcgcccagccagattgcctctacgtcgtgttgttgcagcggttgaaggagctcgctttgtgcaatcgcattctcacattgagaaaaacggttaatgaaccagactcgccgacaaccttgcggtacgtttttaaacgccccctgagggtggcgaaccagcgcaacgagatcgctcagttgcaaggttgcatcaggtgttaacccggtaatatcagcaaactggctccagcgatggacattttctgtgctcactttcgcgcccaaagtatgtcctcccatcacagcaatcacgcagcaactgcttttgggtatgcaaggttcgtgctcatcaggcgcttttaacggcattccacggctgccatctgcttcaatgagaattacgtcacactctggtcgttgcaccagtgcatcaatcgcttctggcgtaaatccctgcacttttccctggttcgctttccagctgtgaaaacaaaaactaatgggggatgtaagagacgcatgaggaagcatggcgggatcacgacagaaaaccacgggccagtgagacgttggcataaacatatgtgtcgtcgtcgtgattaacacacgcctgccgctagcctggagcagttctgccagccaaaaaagcaagctggttttccccccagcaccaacaacagaaatcacagtgggacgtttctgcgcacctaaatcaatgactaatgcgcttgggtcaactatacttttcacgagtctttatgacctctctgggataaattatccccaacttaatccatcaggaagtaacgcaattatcaggcgttattagcccctataaataatggaaccactatgagtgccatcgactgtataattaccgctgccggattaagtagtagaatggggcaatggaaaatgatgttaccctgggaacagggaacaattcttgatacaagtatcaaaaatgcgttgcagttttgtagccgaattattttagtcaccggctatcgtggtaatgaactgcacgaacgttatgcgaaccagagcaatatcactattattcacaacccagattatgcgcagggtttactaacatccgtcaaggccgcagtacccgcagtgcaaacagaacattgttttctcacccacggtgacatgccaaccctcaccatcgatatttttagaaaaatctggagcttacgaaatgatggcgcaatactgccactccataatggcatccccggccatccgattttagtgagtaaaccatgcctgatgcaggcaatccaacgacccaatgtcaccaatatgcgtcaggcactccttatgggagatcattattccgtcgaaatagaaaatgcagaaataattttagatattgatactccggacgactttattacagcgaaggaaaggtatactgaaatttaaaaaacgtagttaaacgattgcgttcaaatatttaatccttccggcactcattatcataatgataaggaatcactgattttgagaaaagagaaaaattgataaatgggctggcaataataattttcaggagtgattttaattctcatttagcacctgtgagttcattcacaaaaagcccttaagtttcgagccgcctcacatttttttatatttcccgccaaacctggcaagagtggtgcgattgttgctctatccccctaaaccaccggatttctcaacaccggtcactcaatgatatctgtataagctaaggagagggttatgggggatattatgcgtcccattccgtttgaggaacttttgacgcgcatatttgatgaataccaacaacaacgcagtatctttggtattcccgagcaacagttttacagtcctgtaaaaggtaaaactgttagcgtcttcggtgaaacctgtgccactcccgtcggccctgccgctggcccgcacacgcagctcgcgcaaaatattgtcacttcctggctgactggcggacgcttcatcgaactaaaaaccgtccaaattcttgaccgcctggagctggaaaagccctgtatcgatgccgaagacgagtgctttaacaccgaatggtctaccgagtttaccctgcttaaagcctgggatgaatacctcaaagcctggtttgccctgcaccttctcgaagcgatgttccagccttctgattccggtaaaagcttcatctttaatatgagcgtcggttacaacctcgaaggtattaagcaaccgccgatgcaacagttcatcgacaatatgatggacgcatctgaccatccgaaattcgctcaatatcgcgatacgctgaataaattactccaggatgacgcatttttagctcgccacggattgcaggaaaaacgcgaaagcttgcaagccttacccgctcgcatccccaccagtatggtgcatggcgtcaccctctccaccatgcacggctgtcctccgcatgaaatcgaagccatttgccgctacatgctggaagaaaaagggctcaacacctttgtgaaacttaacccgaccttactggggtacgcgcgtgttcgtgagatcctcgatgtctgcggtttcggttacataggcttaaaagaagagagttttgatcacgacctcaagctgacgcaagcactggaaatgctggaacgcctgatggcactggcaaaagaaaaaagtctcggctttggcgtaaaactgactaacactctcggcaccatcaacaataaaggcgcactgcctggtgaagagatgtatatgagtggccgtgcgctgttcccgctctccatcaatgttgcagcagttctctctcgcgcctttgacggcaaactgcccatttcttattccggtggtgccagtcagctgactatccgcgatatttttgatacaggtattcgccctattactatggcaaccgacctgctgaaacctggcggctatctgcgcttaagtgcctgcatgcgcgagctggaaggctccgacgcctggggacttgaccatgttgacgtcgaacgactgaacagactggcagcagatgcgttaaccatggaatacacccagaaacactggaagccagaagagcgtattgaagtggcagaagacctgccgctgaccgactgctacgttgccccctgtgttactgcctgcgctatcaagcaagatattccggaatacatccgtctgcttggcgaacaccgctatgccgacgcgctggaactcatctaccaacgcaacgctctgcccgccattaccggtcatatttgcgatcaccagtgccaatacaactgtacccgcctggattacgacagtgcgctgaatatccgcgaactgaaaaaagtcgcgctggaaaaaggttgggatgaatataagcaacgctggcacaaaccagccggttctggtagtcgccatccggttgccgtgattggtgcaggtccggcgggtctggcagcaggttacttccttgccagagcgggccatccggttacgctgtttgaacgcgaagccaatgcgggcggcgtggtgaaaaatatcattcctcagttccgtattcctgcagagttaattcagcacgatatcgattttgttgccgctcacggcgtgaaatttgagtatggctgcagtcccgatttaaccattgagcagttaaaaaatcagggcttccactatgttctgattgccaccggcactgataaaaatagcggtgtgaaactggcgggcgacaaccaaaatgtctggaaaagtctccccttcctgcgtgaatacaacaagggtacagcgctcaagctgggcaaacatgtggtcgttgtcggggcgggtaacaccgcaatggactgcgctcgtgcggcgttacgcgttccaggcgtagaaaaagcaacgatcgtttaccgtcgtagtctacaagagatgcccgcatggcgcgaagagtatgaagaagcgttgcacgacggcgtagagttccgtttcctgaataatccggaacgtttcgatgctgatggcaccttaaccttgcgcgttatgagccttggcgaaccggatgagaaaggtcgtcgtcgtccggttgaaaccaatgaaacagtaacactgcttgtagacagcctgatcaccgccattggtgaacagcaggatactgaagccctgaatgcgatgggcgtgccgctggacaaaaacggctggccagacgtcgaccataatggcgaaactcgtctgactgacgtctttatgatcggcgacgtacagcgcggaccatcctccattgtcgctgctgtcggaaccgcgcgtcgggcgaccgatgccatccttagtcgggaaaatatccgttcccaccagaacgataaatactggaacaacgtcaatccagcggaaatctatcaacgtaaaggcgatatctctatcacgctggtgaacagtgacgatcgtgacgcgtttgtcgcccaggaagccgctcgctgcctcgaatgtaactacgtttgcagcaagtgtgtggatgtctgcccgaaccgcgccaacgtctccattgcggtcccaggcttccagaaccgtttccagacgctgcacctcgacgcttactgtaacgaatgcggcaactgcgctcagttctgtccgtggaacggtaaaccgtacaaagacaaaatcaccgtcttcagcctggcgcaagactttgataacagcagcaacccaggcttccttgtggaagattgccgggtacgagtacgtctgaataaccaaagctgggtgttaaacatcgacagcaaaggtcagtttaacaacgtaccaccggagctgaacgatatgtgccgcatcatcagccatgtccaccagcatcatcattatctgctgggccgcgtggaggtgtaatcatgttgattctgaagaatgtcactgcggtacagctacacccggcaaaagtgcaggaaggcgttgatatcgccatcgaaaacgatgtgattgtcgctatcggcgatgccctgacgcaacgctaccccgacgccagcttcaaagagatgcatggccggattgtgatgccagggattgtctgcagccacaaccatttttacagcgggctttcccgcggaattatggcaaacatcgcccctttgcccggatttcatcagtacgctgaaaaatctctggtggcggctcgatcgcgcccttgatgaagagagcctctattacagcggactgatttgttccctggaagcgattaagagcggatgtacaagcgttatcgatcaccatgcctctccggcgtatatcggcgggagactctccacattgcgcgacgcatttttaaaagttggcctgcgcgcgatgacctgttttgaaactactgaccgtaacaacggcatcaaagagttgcaggaaggtgtagaagaaaacatccgtttcgcccgtttgattgatgaggcgaagaaagcgacaagcgagccgtatctggtggaagcacatatcggtgctcacgcgccgtttaccgtgccggatgccggtctggagatgctgcgtgaagccgtgaaagccacaggccgtggtttgcatattcacgctgcggaagacctttacgacgtttcctacagtcaccactggtacggcaaagacctgctggcacgactggcgcaattcgatctcatcgacagcaaaacgctggtcgctcatgggctgtacttgagcaaagatgacatcaccctactcaatcagcgcgatgcgttcctggtgcataacgcccgtagtaacatgaacaaccatgtcggctacaaccatcaccttagcgacatccgcaatctggcgttgggaacggacggcattggtagcgacatgtttgaagagatgaaatttgccttctttaaacatcgcgatgcgggtggtccgctgtggcctgacagttttgccaaagccctgactaacggtaacgaactgatgagccgcaactttggcgcgaaatttgggcttctggaagccggttacaaagctgatttaaccatttgcgattacaacagcccgacgccgctgctggcagacaatatcgccgggcatatcgctttcggtatgggcagtggcagcgttcacagcgtgatggtcaatggtgtgatggtctatgaagaccgtcagtttaacttcgattgcgattccatttatgcacaagccagaaaagccgctgccagtatgtggcgtcggatggatgcgctggcataaatgacagatgccctcttcccgcagggaagagggttaaataaggaaagaagatgattgaacaatttttcaggcccgactctgtcgaacaggcgctggaactgaagcgccgctaccaggatgaagccgtctggttcgccgggggcagcaaactcaatgctacaccaacccgtaccgataaaaagattgccatttccttacaggatctggaactggactgggttgactgggataacggtgcactgcggattggcgcaatgtctcgcttgcagccactgcgtgatgcgcgatttattcctgcagcgctgcgtgaagccctcggttttgtttacagtcgccatgttcgtaatcagagcaccattggtggtgaaatcgccgcccgccaggaagagagcgtgctgcttcccgtcctgttggcactggatgctgaactggtttttggcaacggcgaaacgctgagtatcgaggactacctggcctgcccatgcgatcgcctgctaaccgaaattatcattaaagatccgtatcgcacctgtgcgacccgcaaaattagccgttctcaggcaggtttaaccgtcgtgacggcagccgttgcaatgacagaccacgacggtatgcgaattgcgctggatggcgtcgccagtaaagcactgcgtctgcatgatgtcgaaaaacaaaatctggaaggcaatgcacttgaacaggctgtcgccaacgccattttcccgcaggaagatttgcggggcagcgtggcctataaacgctatatcacgggagttctggtagccgacctgtatgccgactgccaacaggctggggaggaagccgtatgatcatccactttactttaaatggcgcgcctcaggagctaaccgttaatccaggcgaaaacgtgcaaaagctgttgtttaacatgggaatgcactctgtacgcaacagtgatgatggtttcgggtttgccggttctgacgcaataatctttaacggtaatatcgttaacgcgtccttgcttattgccgcacagttagagaaggcagatattcgtaccgcagaatctctgggcaaatggaacgagttaagtctggttcaacaggcaatggttgatgttggcgtggtgcagtctggttataacgatccagctgcagctctgattatcaccgatcttctcgatcgcatcgccgcacctacccgcgaagagatcgacgacgcgctttctggtttgttcagccgcgatgctggctggcagcaatactatcaggtcattgaactggcggttgcacgtaaaaataatccgcaggccaccattgatatcgctccgactttccgtgacgacctagaagtcattggtaagcattatcctaaaactgatgccgcgaaaatggtgcaggcgaaaccctgctatgttgaagaccgcgtaacggctgacgcctgcgtcattaaaatgttacgtagcccacacgctcacgcactgattactcatctggatgtcagcaaagctgaagccttaccgggcgtcgttcacgttattactcacctgaattgcccggatatctactataccccgggtggtcagagcgcaccggaaccgagtccgcttgaccgccgtatgttcggcaagaaaatgcgtcacgtcggcgatcgtgttgctgcggtcgtcgcagaaagtgaagaaattgcgctcgaagcactgaagctcatcgacgttgaatatgaagtgcttaagccggtaatgagcatcgacgaagcaatggcggaagatgcgcctgtcgtgcacgatgaaccggtggtgtatgttgctggtgcgccagatactctggaagacgataacagccatgcagcccagcgcggcgagcatatgatcatcaacttcccgatcggttctcgccctcgcaaaaatatcgccgccagtattcatggtcatattggcgatatggacaaaggctttgccgatgccgatgtgatcattgagcgaacctataacagtacgcaagcgcagcagtgcccgactgaaacacatatctgctttactcgtatggacggcgatcgtctggttatccacgcctccacccaggtaccatggcacttacgccgccaggtcgcgcgcctcgtgggcatgaaacagcataaagttcatgtcattaaagagcgagttggcggcggttttggttccaaacaggacatcctgctggaagaagtgtgcgcctgggcaacctgcgtgaccgggcgtccggtactgttccgctacacccgtgaagaagagtttattgctaacacctctcgtcacgtcgcgaaagtcaccgtcaaactgggagcgaaaaaagatggtcgcctgacggcagtgaagatggatttccgcgccaacactggcccttacggcaaccacagtctcaccgtaccgtgtaacggaccggcgctgagcctgccgttatatccgtgcgataacgtcgatttccaggtcaccacctactacagcaacatttgcccaaatggtgcttatcagggttatggcgcaccgaaaggtaacttcgctatcaccatggcattagcggaactggctgaacagttacagatcgaccaactggaaattatcgaacgtaaccgggtacacgaagggcaagagctgaaaattctcggtgcaatcggtgaaggtaaagcgccgacctccgttccttccgccgccagctgtgcactggaagagatcctgcgtcagggtcgcgagatgatccaatggagcagtccgaaaccgcaaaatggtgactggcacatcggtcgcggcgtcgccattatcatgcagaaaagcggtatcccggatatcgatcaggctaactgcatgatcaaactggaaagcgacggcacctttatcgttcattctggcggtgcggatattggtactggtctggatactgtagtgacgaaactggcagcagaagtgctgcactgcccaccgcaggacgtgcatgttatctccggtgataccgatcatgcgttgtttgataaaggcgcatatgccagctccggtacttgcttcagcggtaacgcggcgcgtttggcagcggaaaatctacgggagaaaattctgttccacggcgcgcaaatgttgggtgagccagtggcagatgttcaactggcaacgccgggcgtcgtgcgcggcaagaaaggcgaagttagtttcggggatattgcccataaaggcgaaaccggcaccggctttggtagtctggtgggaactggcagttatatcacgcctgatttcgccttcccgtatggcgcaaacttcgctgaagttgccgtcaacacgcgtacgggtgaaatccgcctggataaattctacgccttgctggactgcggtacaccggtcaatccagagttagcgttgggacaaatctacggtgccaccctgcgtgctatcggccacagtatgagcgaagagatcatttatgacgccgaaggtcacccgttaacgcgtgatttacgcagttacggcgcaccgaaaattggtgacattccgcgtgatttccgcgctgtgctggtgccgagcgacgataaagtcggcccgttcggggcgaaaagcatcagcgaaatcggtgtaaatggcgcagctccggcgattgctaccgcaattcacgatgcatgcggcatctggttacgcgaatggcatttcacaccggagaaaatactcactgcgctggaaaaaatataaataataaatggccgcttcggcggcctgtttctctgtttgaacgatgactaaatagtgactgcgaaaatgagataagccgttctcaaggcgtcctgcgccccaaattcgtgggaatttattttactaattcagatgatcaaatttactttaaaaggagtgaagggatgtctgatataaaccatgcaggttctgaccttatatttgaactggaggatcgccctccctttcatcaggctctcgttggtgccattacccatctgttggcaattttcgttccgatggtaacccccgcgttaatcgtgggtgcggccttacagctttccgctgaaacaactgcctatcttgtttctatggcgatgatcgcctctggtattggtacctggttacaagtaaaccgctacggcatcgtcggttctggcctactcagtattcagagtgtcaattttagttttgttacggtcatgattgcgctgggcagcagcatgaaaagcgacggttttcacgaagagttaatcatgagcagccttctcggcgtctccttcgttggcgcatttctggttgtcggatctagttttatcttgccctatttacgtcgggttattacgcctaccgtcagcggtattgtggtactgatgatcggcttaagcctgattaaagtcggcattatcgattttggtggaggatttgcagccaaaagcagcggtacgttcggcaattacgaacatctcggcgttggtttattggttttaattgtggtgatcggctttaactgctgtcgcagtccgttgctacgcatgggagggatcgccattgggctatgtgtcggctatatcgcaagcttatgcctgggcatggtggatttcagcagtatgcgcaatttgccgttaatcaccatcccgcatccgttcaaatacggctttagttttagcttccatcagttcctggtggttggcacgatttatctgcttagcgtgctggaagcagtcggcgatatcaccgccacggcaatggtttcccgccgccccattcagggggaagagtatcagtcccggctgaaaggcggcgtgctggcagatggtctggtttctgttatcgcctccgctgtcggtagtttaccattaaccacgtttgcgcaaaataatggggttattcagatgactggcgtcgctagtcgttatgtcgggcgaaccatcgcggtaatgctggttatcctcggcttatttccgatgattggcggcttcttcacgaccattcccagcgcagttctgggaggcgcaatgacgttgatgttttccatgattgccatcgcagggattcgcatcatcatcaccaacggtttaaagcgccgtgaaacacttattgtcgccacttctttaggtttagggcttggcgtctcctacgatcccgaaatttttaaaatattgccagcctctatttatgtattagttgaaaaccctatttgtgctggcgggttaactgcgattttattaaatattatcctccctggtggctaccgacaggaaaacgttctgcctggtattaccagtgcggaagagatggattaacagtaaaggagtcaatgatgagtggagaacacacgttaaaagcggtacgaggcagttttattgatgtcacccgtacgatcgataacccggaagagattgcctctgcgctgcggtttattgaggatggtttattactcattaaacagggaaaagtggaatggtttggcgaatgggaaaacggaaagcatcaaattcctgacaccattcgcgtgcgcgactatcgcggcaaactgatagtaccgggctttgtcgatacacatatccattatccgcaaagtgaaatggtgggggcctatggtgagcaattgctggagtggttgaataaacacaccttccctactgaacgtcgttatgaggatttagagtacgcccgcgaaatgagcgcgttcttcatcaagcagcttttacgtaacggaaccaccacggcgctggtgtttggcactgttcatccgcaatctgttgatgcgctgtttgaagccgccagtcatatcaatatgcgtatgattgccggtaaggtgatgatggaccgcaacgcaccggattatctgctcgacactgccgaaagcagctatcaccaaagcaaagaactgatcgaacgctggcacaaaaatggtcgtctgctatatgcgattacgccacgcttcgccccgaccagttctcctgaacagatggcgatggcgcaacgcctgaaagaagaatatccggatacgtgggtacatacccatctctgtgaaaacaaagatgaaattgcctgggtgaaaagcctttatcctgaccatgatggttatctggatgtttaccatcagtacggcctgaccggtaaaaactgtgtctttgctcactgcgtccatctcgaagaaaaagagtgggatcgtctcagcgaaaccaaatccagcattgctttctgtccgacctccaacctttacctcggcagcggcttattcaacttgaaaaaagcatggcagaagaaagttaaagtgggcatgggaacggatatcggtgccggaaccactttcaacatgctgcaaacgctgaacgaagcctacaaagtattgcaattacaaggctatcgcctcagcgcatatgaagcgttttacctggccacgctcggcggagcgaaatctctgggccttgacgatttgattggcaactttttacctggcaaagaggctgatttcgtggtgatggaacccaccgccactccgctacagcagctgcgctatgacaactctgtttctttagtcgacaaattgttcgtgatgatgacgttgggcgatgaccgtagcatctaccgcacctacgttgatggtcgtctggtgtacgaacgcaactaataataaaactttaacatcctcgtgaggacatcattatgtctggagacatcctacaaacaccggacgcaccaaagccacagggcgcgctggataattattttaaaattaccgctcgtggcagtaccgttcgtcaggaagtactggctggcttaacgacctttctggccatggtttattccgttatcgtcgttccgggaatgctgggcaaagcaggttttcctcccgcagctgtgtttgttgccacctgtctggtcgcgggcttcggcagcttgctgatgggattatgggctaatttgccaatggcgattggttgcgcgatttccttgacggcgtttaccgcattcagtctggtactcgggcaacaaattagcgttcctgtcgcactgggcgcggtatttctgatgggcgtcatcttcaccgccatttccgtaaccggtgtgcgtacctggatcttacgtaatttgccgatgggtatcgctcacggtacaggtatcggtatcgggctgtttctgctgctgattgctgctaacggtgtgggtatggttatcaaaaacccgattgaaggcttgccagtggcgctcggtgcgtttacctccttcccggtgatgatgagcttgctggggctggcggtcatcttcggcctggagaagtgtcgcgtacccggcgggatcttgttggtgattattgcaattagcatcatcggcttaatctttgacccagcggtgaaataccacggtctggtggcgatgccaagcctgactggcgaagatggtaagtctctgattttcagcctcgatattatgggtgcactccagccaactgtacttccgagtgtactggcattggtgatgaccgcagtgttcgacgctactggcaccatccgtgccgtcgccggtcaggcgaatttgttggataaagacaaccagatcatcaacggcggcaaagccctgaccagtgacagtgtaagtagtatattctccggcctggtgggcgcagcgcccgcagcggtttatatcgaaagtgcggcaggaaccgccgccgggggtaaaacaggtttaaccgcaaccgtagtgggggcgttattcctgttaattctgtttttaagtccgctgagttttttgatccctggttacgccactgcacccgctctgatgtacgtaggtttgctgatgttaagtaacgtcagcaagctggatttcaatgattttattgacgctatggctggcctggtgtgtgccgtgttcatcgttctgacttgtaatatcgttaccggtattatgctgggctttgtgacactggtcgtaggccgcgtctttgcacgcgaatggcaaaagctgaatattggtacggtgatcattactgccgcactggtcgcattttacgcgggtggttgggcaatctaatagattctccgcgcctttcagcgcggagatttctttcagagaggattctcaccgctggcaacaatacgctgctggcggactcgcctgagttctctttcagtaagcaactgcagcgcctgtgttgggcaagattcaacgcaggctggcccctcttcccgctgttcacagagatcgcatttcacaatttgttgtcgggtatcccccggcaagctctgaatggtgatcattccaaacgggcacgcactgacgcaactctgacagccaatacaacgggcagaattggtctgcaccacctgctcgcccatcgtcagcgcccccacggggcaagcgccaacacaaggggcgttttcacactgatggcacatcaccggcgcactgatgctgtccagtcgctgtaccttcagccggggtaaaaagacatcggcattcaactcctgttcactagggtgagcgaccacacaggctacttcacaagtacggcagccaatacagtcagccggattaacgataattaagcttttcatcagcttgccttcgtatcaaacagagttaacatatcgcgcgccgcctgccttcctgcggccattgcagtgacaaccagatccgcgccatgaactgcatcaccaccagcaaagacttttttcagatgcgtctgggtaggtaaatacccgacgtcaccggtttgaatcaggccccatttatcgagtttaattccgctgccctgcaaccacggcatggcatgcgcctggaaaccaaaggccataatcagaacatcggcgggcaattcaaactcactacccgctaccggacgaggacgacggcgaccatccggccccggctcacccatggcggtacgaatcaggcccaccgcagttaaacgcccatcttcgtcacaagcgatatattgcggttgaacattgaactgaaactcgacaccttcctcgcgcgcattaaccacctctttgcggctgcccggcatactgacttcatcacgacgatacgcgcaggtcacgctggcggcattgaggcggatggaagtccgcaaacaatccattgtcgtatcgccaccgcccaataccacgactcgcttaccttccacgtccgtcagcggatactcttcagactccggcaatcccatgagctggcgggtatgggcagtcaggaacggtagagcctgaatgacaccgggcgcatcttcatgcggcagatctgctcgcatcatcccgtaagtccccacgccgatgaaaactgcatcatattcagaagttaaatcgctaaaggtaatatcgcggccaatttcacagttaagatgaaagtcgattcccattgcggtgaatatctctcgccgctggcttaataccgttttatcgagtttgaaaggaggaatgccaaaagtcagcataccgccaatttctggatggcgatcaaagacatcgacctgaactcctgcgcgcgccagaatatcagcacaccctaaccctgcaggcccagcgccaatcaccgccactttttcgctacggggaacaactttgctgacatcgggacgccaacccatcgccagcgcggtatcggtgatgtagcgttccagattaccgatagagactgcgccgctgtgatctttcaaagtacatgcgccttcacaaagacggtcctgtggacataccctgccgcaaatttctggtaaggaactggtctggtggcaaagttctgccgcttcaataatctttccttcctgtaccagacggatgtaatccggaatagcgttatgcagcgggcaatgccagttgcagttagctttttcggcacaataaacacagcggtcactctcataagtcgcttgttgtggatccagcccgcaatatatttcgccaaagtgggttttccgttcactcgcactaattttatctgcgcctttacggctgttaacggggagcaacgctgcactgcgagatggctgagcgtcactactcgcttttcctgctgccgttttgcgctggcgggccacctttatctgctgcaaccctttatcgtccatcagtcgtaacgcctgtgttgggcaaacttcaatacaggcttgcgtgccggaactgcgctggttacaaaggtcgcatttctgcgcaatcgtatcgaccatctcaacgacgccaaaggggcaagcgattgcgcatcttttacaaccaatacatttttgctcgtccagttgtacgctatcggactggaaagtcagagcattaaccggacaagccgtaacgcaaggggcattgttgcagtgatggcaggccaccggattcgcagcctggcctttccctacaacgtggatacgcggtcgaaagtcactgtgactcagcggccagttttcttgattgtgtgccaccgcacaggcaatttcacaagcatgacagcctatacattccgcagcttcagcagcaataaacttattcatttgcatccctttcatttaatgagttatgtcttctcaaatttcgcgatgcaataaacgggcatatattaggtagcatgaccgttttaattataattttgcgactgagttcaaattattgcccctcaatctatgccgctttcattatttcaacattgccgatcaaaagagcgctatccagataaaaacgattaaatgcgagagtgcgacatgccagaatgattaatgaaatatcaatatgagaaaattacagataattccattgtcaggttctcttctcattttcgtggtttaaccacgattatgtgattgcctccgcaattcctgtctctaactccccttcctcgcaaaaactggcactccacgagcatgtgtttagacagtttcattaacgtaaacggttgctttttactctggcgggcgaaaggagaaacactgatgagcgccatagattcccaacttcccagttcttctgggcaagaccgcccaactgatgaggttgaccgcatattaagtccaggaaagctgatcatactcggtctgcaacacgtccttgtcatgtacgcaggtgcagtcgctgttcctcttatgattggtgaccgactgggcctcagtaaagaagctattgcgatgctcattagcagcgatctcttttgctgcgggatcgtcacattattgcaatgtatcggtatcggccgctttatggggatccgcctgccggtgattatgagcgtgacctttgctgctgtaacaccaatgatagccattgggatgaacccggatatcggcctgctggggatatttggtgccactatcgccgcgggttttatcaccacattattagcgccacttatcggtcgcttgatgcctttattcccgccactggttaccggtgtggttattacttctatcgggcttagcatcattcaggtgggtattgactgggccgccggaggtaaagggaatccgcaatatggtaatcccgtttatttaggtatctcctttgccgtcttaatttttatcttgctcattactcgctatgcgaaaggatttatgtccaacgtcgccgtattactggggattgtatttggctttttacttagctggatgatgaatgaagtcaatttatccgggctacatgatgctagttggtttgcgattgttacgccgatgagctttggtatgccgattttcgatcccgtttccattctgaccatgactgccgtgttaatcatcgtgtttatcgagagtatggggatgttcctggcactgggtgaaatagtcggtcgtaaactctctagccacgatattattcgcgggctgcgtgtcgatggcgtagggacaatgataggcggcacgtttaacagcttcccccacacgagtttttctcaaaacgttggcctggttagcgtgacgcgcgttcatagccgctgggtgtgtatttctagcggaattatattaatcctgtttggcatggtgccaaaaatggcggtgctggtagcctccattccgcaatttgtgctgggcggcgctggtctagtgatgttcggcatggtactggcgacagggattcgaattctgagccgctgtaactacaccaccaaccgttacaacctctatattgtggcgatcagtctcggcgttggcatgactccgacgctctctcacgatttcttttctaagttaccggccgtactgcaaccgctgctacatagcggcattatgctcgcaacccttagcgccgttgtgctgaacgtcttctttaatggctatcagcatcatgctgacctggtgaaggaatccgtctctgataaagatttaaaagtcaggacagtacgtatgtggcttctgatgcgcaagctgaagaaaaatgagcatggagaataatatgaattttttaatgcgcgctatattcagtctgttgttgctttttactctctctattcctgtcatttctgactgtgttgcaatggccattgaaagtcgcttcaaatatatgatgctacttttttaaatggtttttacctgtcggcatccgctcaaaacgggcggttgtcgataaacgctcacttggttaatcatttcactcttcaattatctataatgatgagtgatcagaattacatgtgagaaattatgcaaacggaacacgtcattttattgaatgcacagggagttcccacgggtacgctggaaaagtatgccgcacacacggcagacacccgcttacatctcgcgttctccagttggctgtttaatgccaaaggacaattattagttacccgccgcgcactgagcaaaaaagcatggcctggcgtgtggactaacagcgtttgtgggcacccacaactgggagaaagcaacgaagacgcagtgatccgccgttgccgttatgagcttggcgtggaaattacgcctcctgaatctatctatcctgactttcgctaccgcgccaccgatccgagtggcattgtggaaaatgaagtgtgtccggtatttgccgcacgcaccactagtgcgttacagatcaatgatgatgaagtgatggattatcaatggtgtgatttagcagatgtattacacggtattgatgccacgccgtgggcgttcagtccgtggatggtgatgcaggcgacaaatcgcgaagccagaaaacgattatctgcatttacccagcttaaataaaaaaaccccgacatttgccggggttgtgagcataacgtaatgcttattttaccggacgcatcgccgggaacagaataacgtcgcggatggtatggctgttggtgaacagcattaccatacggtcgataccaattcccagacctgctgtcggcggtaagccatgttccagtgcggtgacgtaatcttcatcgtagaacatcgcttcgtcgtcacctgcgtctttcgcggcaacctgatccaggaagcgttgcgcctgatcttccgcgtcattcagctcgctaaagccgttaccgatttcacgaccaccaatgaagaactcaaagcggtctgtgatttccgggttaacgtcgttacgacgcgccagcggagaaacttctgccggatattcagtaatgaaggtcggctgaatcagatgtgcttctgccacttcttcgaagatctcggtaacgatacggcccagaccccagctcttctcaacgtggatgccgatagattcagcaattgctttcgcagagtcgaagttgtccagatccgccatgtcggtttccgggcgatatttcttgatcgcttcacgcatggtcagtttttcgaacggtttaccgaagtccagcgtcacgtcgccgtaggtcacttccgtcttaccgagaatatcctgtgccagagtacggaacaggctttcggtcagctcgatcagatctttgtaatctgcgtaagccatgtagagttccatcatggtgaactctgggttatgacgtacggaaataccttcgttacggaagttacggttgatttcgaatacacgctcgaagccaccaaccaccagacgcttgaggtacagttccggcgcgatacgcaggtacatgtcgagatccagcgcgttatggtgggtgataaacggacgcgcagcggcaccgccagggatcacctgcatcatcggcgtttcaacttccataaagccgcggttcaccatgaactggcgaataccagagaggatctggctgcgcactttaaaggtgttgcgggattcatcgttggagatgagatcgagataacgctgacgatagcgcgcttcctgatcctgcaagccgtggaatttatccggcagcggacgcagtgctttggtcagcagacgcaactcggtgcagtggatagacagttcgccggttttggttttgaacagcttacctttcgcgccgaggatgtcgccgaggtcccattttttgaactgctcgttataaacgccttccgggagatcgtcacgggcaacgtacagctgaatgcgaccgccaacgtcctgcagggtaacgaaagacgctttacccataatacgacgggtcatcatgcggccagcaacggcgacttcgatgttcagcgcttccagttcttcgttctctttgccgtcgaattctgcgtgcaattggtcagaggtatgatcgcgacggaaatcgttcgggaaggcaatcccctgctcgcgcaggttcgccagcttctcacgacgcgttttcagttcattgttaagatcgactaccgcgtcagcgccctgtgcgtgttgttcagacatgttggttcctcataaccctgctttcaaacttgcttcgataaattgatccaggctgccgtccagcacggcctgcgtgttgcgggtttctaccccggtgcgcagatctttaatgcgggagtcatcaaggacataagaacgaatctggctgccccagccgatgtcggatttgttatcttccatcgcctgtttctcggcatttttcttctgcatctccagttcataaagcttcgctttcatctgcttcatggcctgatctttgttcttgtgctgggaacggtcgttctggcactgggtcacgatcccggtcgggatgtgggtaatacgcaccgcagattcggtacggttaacgtgctgaccgcccgcgccggacgtgcgataaacgtcaatgcgcagatccgccgggttgatttcgatatcaatatcatcatcaacttccggataaacaaacgcggagctgaagctcgtgtggcgacgaccgccggagtcaaacgggcttttacgcaccaggcggtgaacgccggtttctgtacgcagccagccgtaagcgtaatcgccggagattttgatcgtcacggatttaatacccgccacttcaccttcgctctcttcgatgatttcagttttgaaaccacggctttctgcccagcgcagatacatacgctcaagcatgctcgcccagtcctgtgcttccgtaccgccagaccccgcctgaatatcgaggtagcagtcggcgctgtcatattcgccagagaacatacggcggaactcaagctgcgccagtttttcttccagggcgtcgagttcagcaacggcttcgttaaaggtttcttcgtcgtcagcttctacagccagttccagcagaccagaaacatcttccagcccctgtttcatttggtcgagggtgtcgacaacggcttcgagggaggaacgctctttacccagcgcctgtgcgcgttcgggttcgttccagacatccggctgttccagctcggcgtttacttcttccagacgctctttcttggcgtcgtagtcaaagataccccctaagaacgtcggagcgttccgtgaggtcctgaatgcgattatttaccggattaatttcaaacatggtctgatttcttttattgagctagtcaaaatgcggtgataagagcgggattgtacccaatccacgctcttttttatagagaagatgacgttaaattggccagatattgtcgatgataatttgcaggctgcggttgccgcgaaactcgttgatatcgagcttataagccagttgcacttcgcgcacgccgttatccggccagagggcggtatcgacattaaaagcaataccatccagcagtggaccgccgccgaccggttcgaccatcaccttcaaatgacgttcgcccaccagccgctgttgcagcagacggaaatgaccgtcaaacagcggctccgggaacatctgcccccacgggccagcatcgcgcagcagctgcgccacttccatggtcatttcggccgggcttaacggaccgtcacttaccacttcgccttgcaataggctagggtccagccactcagtaaccagttcgccaaaccgttgttgaaagagtttgaatttatcctcttccaggctcaaacccgccgccatcgcatgaccgccaaacttcagcatcatgccagggtagagtgtgtctaatcgctccagcgcatcacgcatatgcagcccctgaatggagcgaccggaacctttcagcgtaccgtcacctgctggcgcaaacgcgataaccggacggtgaaaacgctctttgatgcggctagccagaataccgacaacgccctgatgccattcggggtgatacattgccagcccgccgggtagcgtgtcacggctgcgctccagtttctcgcacagggtcagggcttcaatttgcattccttgttcgatctcttttcgcgtctggtttagcgcatcgagttcatttgccagcacgcgcgcttcgccgatgttgtcgcacaacaacagcgccacaccgacggacatatcgtccagtcgtccggcagcattgagacgtggccccagcgcaaaacctaaatcgctggcggcgagtttttgtgcatcacggtttgccacttcaagcagcgctttaatccccggacggcactttccggctcggatgcgactcatcccctgccaggtcagaatgcgattattagcgtccagcggcacgacgtccgccactgtccccagcgcgaccagatccagcagttctgccaggttaggaattgcgatgttacgctcatcaaaccagccctgatcgcgcaaaaaggtgcgcagcgccagcatcagataaaacgccacacccacgcctgccagacttttgctcgggaaattacagtcgcgcaagttagggttaatgatcgcttccgctgcgggtaatgtgtcgcctggcaaatggtgatcggtaacaataaccgggatgcccaagctgcgagcgtgctcaacccccgcatgggaggaaataccgttatccaccgtgacaattaactgcgcgccacgggcatgggcctgatcgaccacttccgggcttaagccgtaaccgtcttcgaaacggtttggtaccaggtagtcgatattgctgcaaccaaggctgcgcatcgccagcacgcttagagccgtgctggtcgcgccgtcggcgtcgaaatcaccgaccacaataatccgcgttccttcgcgaaaagcgttgtaaaggatctcaacggccttttcgacgccgctcagttgctgccagggcagcatacctttaacactgcgttccagttcttgcgcactgcgtactccccggctggcgtataaacggcgcagcaagggaggcaattcagcgggcaagtctgccgtttcatcgacttcacggcgacgaagttgtatctgttgtttcacgcgaattatttaccgctggtcattttttggtgttcgtcgaggaattctttcatctctttcggcggctggtaacccggaacaagtgtgccattgctcagcacaactgccggagtaccgctaacgccaagctggacgccaagtgcgtaatggtcggcaatatccacgtcgcaactggctggtgcgacgcttttacctgccatcacatcatcaaacgctttgtttttatctttcgcacaccagatagctttcatttctttctctgcatcgctgtccagcccctggcgcgggaaagcaagataacgcacggtgatccccagcgcgttgtagtctgccatttgctcatgcagtttgtggcagtaaccacaggtaatatcagtaaacacggtgatgacgtgtttttcctgcggcgctttataaacgatcatctctttttcaagcgcattcaactgctttaacagcatcttattggtgacattgaccggagccgtgccactaacgtcatacattggcccctgaatgatatgtttaccatcatcggtgatgtacaacacgccgctgttagtcagaactgtcttcatgccagctacaggcgcgggctgaatatcgctgcttttgatgcccattttggctaacgtttgttgaattgccgcgtcatcagcctgagcaaagccactaaacgccgctaacaaagtaaacaacataaaacctttcttcataaatcttcccgttcttttcagacatcacgcccgcgggtgatgctgttgatgaagttgccgcagacgctcggtagcgacatgcgtataaatttgcgtggtggagagatcgctgtggcccagtagcatctgcaccacgcgtaaatccgcaccatgatttaataaatgagtggcaaaagcgtgacgcaacacatgcggactcagcttttcgctgtcgatacccgccagcacagcataatgtttaatacggtgccagaaggtctgtcgcgtcatctgctgcgcacgctggctgggaaacaacacgtcaatactcacaccattcagcagccacggacgcccatgttccagataggtttccagccagtaaaccgcctcttcacctaacggcaccagacgctctttgttgcctttaccaatgacccgtaccacgccctgacgcaggctgatatcactcattgtcagtccgaccagttcagagacacgcagcccggtagcatacaacacttcaagcatggctttatcgcgtagctccagtggctgatcgattaatggtgcctgtaataaacgttcgacctgcgcttcgcttaaatcttttggcaaacgctggggcaatttcggactagcgagatgcgcactgggatcgtcttcacgaaacttttcgcgataaagatactggaacaatcggcgcactgcactcagcaaacgcgcactgctggtggctttatacccgccctccagccgttctgccagtaatgcctgcaaatcgtcactttgcgccgtcgccagcgtcaacccgcggtgatgcaaccactccaccatcatactcagatcgcgacggtaagcgttcaacgtattttcagccagatttttttccagccacagagcatcaagaaactgctcgatgcgtgccagatcctgtttcacttgcgccccttatggtcactcatttgatccattatgccttattgtgccgtgactaaagcgattctgatacactagccgcaaaagccacagcagaatcgagaagcttacgttatgaatatgggtcttttttacggttccagcacctgttacaccgaaatggcggcagaaaaaatccgcgatattatcggcccagaactggtgaccttacataacctcaaggacgactccccgaaattaatggagcagtacgatgtgctcattctgggtatcccgacctgggattttggtgaaatccaggaagactgggaagccgtctgggatcagctcgacgacctgaaccttgaaggtaaaattgttgcgctgtatgggcttggcgatcaactgggatacggcgagtggttcctcgatgcgctcggtatgctgcatgacaaactcagcaccaaaggcgtgaagttcgtcggctactggccaacggaaggatatgaatttaccagcccgaaaccggtgattgctgacgggcaactgttcgtgggtctggcgctggatgaaactaaccagtatgaccttagcgacgagcgtattcagagctggtgcgagcaaatcctcaacgaaatggcagagcattacgcctgatctcactgacggcttagcgcatatgctttgccgtcatctttatctttgcgtctcttgttgcaacaaaatccgccgtaaatcccgccattcagcttcgtccatgctgtcggctgccagccataaatgttgccgtttaccgccatcagaacgtaaacgcagcatcatgccgctcttaatcatccacggtgctttgacgatgctccactcctgcccttgccaacgcaaacgcccgtccatcaacaagcgaatttccccctggcgagcattaatacgccgctggctgcgaacgcaatcaaacaccaccaggctaagtaacaccatccataacggggtgtaactgagtggccagggcatgagtaaaataacagcggcaaccagcccatgaatcagcaaggaaagccactgtgcgcgccaggagacgcgcaaatcagattgccacaggaccacgttcccggttccgtgtctggatgagtcggaccatcatttccagttctgcatcggccggtttaccgtgattcatcagccagttaaacaggtccggatcgtcacattccagcagacgaataaagatgcgtttttcgtcatcgcttaagctgtcgtactcatgttcgaaaaacggcatgatactaatatcgagttcgcgcataccacggcggcatgcccaatgaatgcgggctttgttgttaatgtccatcttcttcctgtctcacgaaaatccagtacccggctattgtaacgtgtttttcgccttcttttacgggaatatcagtaaacaccatcgcgatcgcgaaattaattcacaacaattcaatggcttcatttttttggaagtcgcctcgcagaaggcacagatcgcgtagtgaaagcacttgcattgcctcatagctcttttaccattagtcattaatacgccgttaagcaactcaggactctattatggcttttacaccttttcctccccgtcagcctacggcttctgcccgtttaccgctgacgctgatgacgcttgatgactgggcgcttgccaccattactggcgcggacagcgaaaaatatatgcagggtcaggtgacagcagatgtcagccagatggcagaagatcagcacctgctcgccgcccattgcgacgccaaaggtaaaatgtggagcaatttacgtctgttccgcgacggcgatggctttgcatggattgaacggcgcagcgtgcgtgaaccgcagctgactgaactgaaaaaatatgcggtattctctaaagtgaccatcgcgccagacgacgagcgtgtgctgcttggtgttgccggttttcaggcgcgcgccgcgctggcaaatctctttagcgaactgcctagcaaagaaaaacaggtagtcaaagaaggcgcgaccactttgctatggtttgaacacccggcagaacgtttcctgatcgtaaccgatgaagctactgctaatatgctgaccgataaactgcgcggtgaagcggaactgaacaatagccaacagtggctggcattaaacattgaagcgggtttcccggtgattgatgccgccaacagcgggcagtttatcccacaggcgaccaatctccaggcgctgggcggtatcagctttaagaaaggctgttataccggacaagagatggtggcgcgagcaaaattccgtggtgccaataaacgtgcgctctggttgctggcaggtagcgccagccgactgccggaagctggtgaagacttagagctgaaaatgggcgagaactggcgtcgtaccggtacggtactggctgcggtaaaactggaagatggtcaggtcgtggtacaggtcgtcatgaataacgatatggaaccggatagcatcttccgcgtacgcgacgatgcgaatacattgcatatcgagccgctgccgtatagcctcgaagagtaaatctctttatcgcatcaggcatttatcgcctgatgcgacgctggcgcgtcttatcatgtctgggatttgatgcctttatcacaacagggacgaggcccgtagatcggataaggcgttcacgccgaatccggcagttgtgctccgatgcctgatgcgacgctggcgcgtcttatcaggcctacaaaggcatacccattacgcctgcccaatatacaaatagatcgccagaaagtggcacacactaccgccgagcacgaagccgtgccagatggcatggttgtatggaatgcgtttgcagacgtagaaaatcaccccgaggctataaaccacgccgcctaccgccagtaaggtaacgctgcccgccgcgagcttaactgccatttcataaattaccaccaggctcagccagcccatcgccagataggtcaccagagataaaattttgaatcggtgcgcgatggtcagtttaaacagaatacccagcaatgccaggctccagataacaatcatcaacccgcgcgctaacggagaatccagccccaccagcaaaaacggcgtgtaggttccggcaatcaacaggtaaatagcgcaatggtcaaatttcttcagccacatttttgcccgttgatgaggaatggcgtgatagagcgtgctagcgaggaacagcaggatcatactgccgccatagaggctgtagctggttatcgctgtggcgctggcattaagatccaccgcctgaaccagtagcaacaccagcccaacgataccaaacaccaacccaatgccgtgactgacgctgttggctatttcctctgccagactatatccctgcttaatgaggggcttctgaaccataacttactccggagaaacgtacacgcacatgtatacctctccagcgtaactgagaatagttccagtgaacacctgttagctaaaataaattctgatttgagactaatctcctaaaaatcatgaaattaaatgcgaaatttcaactaacaggcgtgagttcaatttaaagacatttaaattcaatcacataaaattgtgtctgaccgggatagatgtcagcaatgacttttttcagttcagtcagggtcatattttcctgctctgcatgtttttcagtcagcgtatccagcgttacggtactggttgcggtgacttcaatcgtgcaaaaataaccgtcatcttcaaaacgtccgacacgaagcacatcacccgttttgaagtggctttcagactcgtcgcggatggtgatggttttacgcccagccagaatgtcatcctggaaacgttgaaaaaaagtgatgtcgtttggctgcatggtactatttcctgtaagaattgactcatctggagcctatgatagtgaaaaaactcaccttaccgaaagatttcttatggggcggcgcagttgccgctcatcaggtcgaaggcggctggaacaaaggcggaaaagggccgagcatttgtgacgttctgaccggtggcgcacacggcgtgccgcgcgaaatcaccaaagaagtcttgccaggaaaatactatccaaaccatgaagccgttgatttttatggtcactataaggaagacatcaagctatttgccgaaatgggcttcaaatgttttcgtacatccattgcctggacgcgcatttttccaaaaggcgatgaagctcagccaaacgaagaagggctgaagttctacgatgatatgttcgatgaactgctgaaatacaacatcgaaccggtgatcaccctctcccactttgaaatgccgctgcatctggtgcagcaatacggtagctggaccaaccgtaaagtggttgatttctttgtacgtttcgcggaagtggtatttgaacgctataagcacaaagtcaaatactggatgaccttcaacgaaattaacaaccagcgtaactggcgtgcaccgctgttcggttactgctgctccggcgtggtgtataccgagcatgaaaacccggaagagacgatgtatcaggtgctgcatcaccagtttgtcgccagcgccctggcggtgaaagctgcgcgtcgcattaacccggagatgaaagtcggctgtatgctggcgatggtgccgctctatccttactcctgtaacccggacgatgtgatgttcgctcaggagagcatgcgcgaacgctacgtctttaccgatgtgcagctacgcggctattacccgtcctatgtgttgaacgagtgggagcgtcgcggatttaacatcaaaatggaagacggcgatctggatgtgctgcgtgaaggcacctgcgattatcttggtttcagctattacatgaccaatgcagtgaaggccgaaggcggcaccggcgatgcgatctctggttttgaaggcagcgtaccaaacccgtatgttaaagcatctgactggggctggcagattgatccagtaggtctgcgctatgcactttgcgaactgtatgagcgttatcagaggccgctgtttattgtcgaaaacggttttggcgcttacgacaaagtggaagaagatggcagcatcaacgacgactaccgcattgactacctgcgcgcccatatcgaagagatgaaaaaagcggtgacttacgatggcgtggatctgatgggctacacaccgtggggctgcatcgactgcgtgagcttcaccaccgggcagtacagcaaacgctacggctttatctatgtgaataaacatgacgacggtactggcgatatgagccgtagtcgtaagaagagctttaactggtacaaagaggtgattgccagcaacggcgagaagctttaagtcgatgaagtaccggatgcaatacttgttgcatccggtcagacaacttccctgttttatttcccgcccgccaaatcgataaaacttcccgtgacgtaagaggctttatcacttagtagccagacaatggcctgcgcgacctcttctgcctgtccaccacgctgcatggggatgttgctcttaacgcgatcgacgcgtccaggctcgccgccgctggcgtgcatttcggtataaataaaccctggccgcacgcagttaacgcggatcccctgcgcggcgacttccaggcttagtccggtggttaacgtatcaatcgcccctttgcttgccgcgtaatcaacatattcccctgggctacccaaccgactggccacgctagagacattgacgatagcgccgccactgccaccatttttaagcgccatgcgttttaccgcctcgcggcagcagagaaaatatcccgtcacgttggtggaaagtactcggttgattcgctctgcggtaaggttttcaacggtgcactgggtaaacaagatcccggcgttattgaccagcgctgctagcggttcatcgtgctgatcgattgctgtaaacatcgcaacgacctggttttcgtcgctgatatccgcctggagcacgaatgctttgccaccggcttgcgttattaagttcatcacttcctgcgccgcgtggaggttttgctgataattaaccgccaccgtatacccttcttgcgccaacagtaatgcagttgcccgcccgatgccgcgactgccaccagtcacaagtgctatagccatttgtttttccgagaaaaattaattcgttgacgtatctttgagattgctaacaaactggctcaatcttcaatgttggcacgcttttccccctcgccctttcagggagagggccggggtgagggtaaatattcgcgccagtgccggcctgttcccctcaccctaaccctctccccaaaggggcgaggggactgtctgagcacttttgtactttgtcatctgactaaaaaggcgccgaagcgcctttagaaaatagtcgaatcagtgaattactggtattcgctaatcggtacgcaggagcagaacaggttacggtcgccgtaaacatcatccagacgtttcactgtcggccagtatttgtctgccacacctgccgggaataccgcaacttcacggctgtacggatgcgcccactcggcgaccagttcgctctgaatgtgcggcgcgttcaccagcgggttatcttccagcggccagacaccggctttcacctggtcaatttctgcgcggatagccagcatcgcgtcgataaagcgatccagttccactttgctttcagattcagtcggttcaaccatcagcgtacccgccaccgggaagctcatcgtcggcgcgtggaaaccgtagtcgatcaggcgcttggcaatatccagctcgctgatgccggtttcttctttcagcgggcgaatatcgagaatacattcgtgcgccacgcgaccgtcgcgaccggtatacagcaccgggaaggcatcctgcaggcggctggcaatatagttggcgttgaggattgccacctggcttgcttttttcagcccttctgcgcccatcatgcggatgtacatccagctgattggcaggatagaggcgctaccgaacggtgccgcagaaaccgcgccctgacgggttaacatgccttcgatttgcaccacgctatgacccggtacaaacggtgccaaatgcgctttcacgccgatcggtcccatacccggaccaccaccgccgtgcggaatgcagaaagttttatgtaggttaaggtgactaacgtccgcaccaataaagcccgggctggtgatgccaacctgggcgttcatgttcgcgccatcaaggtaaacctgaccgccgaactgatgcacgacttcacacacttcacggatcgtttcttcatacacgccgtgggtagaaggataagtcaccatgatacaggagaggttatcgcccgcctgttccgctttcgcgcgcagatcagtcagatcgatgttgccgtttttatcacacgccacaaccaccacctgcattcctgccatatgtgcagaagcggggttagttccgtgcgcagaagccgggatcaggcagatatcgcgatgcccttcgttgcggctttcatgataatgacgaatcgccagcaggcccgcgtattcgccctgtgcgccagagttcggctgcatacaaacggcgtcgtaaccggtcagtttcaccagccagtcagccagctgcgcaatcatctgctgataaccttcggcctgctccggcgggcagaacgggtgcagttcggcaaattccggccaggtgattgggatcatctcggcggcggcgttcagtttcatggtgcaggaacccagcgggatcatcgcctgattcagcgccagatctttacgctccaggctgtgcatatagcgcatcatttcggtttcgctgtggtagcgattaaacaccggatgggtgaggatttcgtcgtcgcgcagcatcgcaggctggatagagcggctgtcgtgagccacgtctttgtccagcgtgtcgatgtccaggccgtggttatcgcccagcagcacgttgaaaagctgcattacgttttcacgcgtggttgtttcatcaagggtgatcccaaccgcgttcagaatatcgctacgcaggttgatttcagccgcttcggcacgcgtcagtacgcccgctttgtcggccacttccacacacaaggtgtcgaaatagtgcgcatggcgcagtttcagacctttttgttgcaggcccgccgccaggatatcggtcagacggtgaatgcggttagcgatacgtttcaggccaaccgggccgtgataaacggcatacaggctggcgatgtttgccagcagtacctgggaagtacaaatgttggagttcgctttctcacggcggatatgttgctcgcgagtctgcatcgccatgcgcagcgcggtattgccagctgcatctttgcttacaccgataatacggcccggcatactgcgtttgtattcatctttcgccgcaaagaatgccgcgtgtgggccaccgtagcccatcggcacgccgaagcgttgcgcgctaccaaaaacaatatccgcgccctgtttacccggcgcagttaacagcaccagcgccataatatcggcggcaacgctgaccacaattttgcgacttttcagttcgctaataagcgcagtgtagtcgtgaatttcaccggtagtgcctacctgctgtaacagcacgccgaagacgtcctgatggtcgagcactttttgcgcgtcatcgacaatcacttcaaaaccaaaggtttcggcacgagtacggaccacatccagcgtttgcggatgcacatcggaagccacgaagaagcggttggcatttttcagtttgctgacgcgtttcgccatcgccattgcttcggcggcagcggtggcctcgtccagaagagaagcagaggccatatccagtccagtcaaatccagcgttacctgctggaagttgagcagtgcttcaaggcggccctgggagacttcaggttgatacggagtgtacgcggtataccagcccggattttccagcatgttacgcaggataaccggcggtagctgcacggcggtgtaacccatgccgatgtaagacgtgaagcgtttattgcgactggcaatagccttgagttctgccagtgcggcgtattcggtcgccggtgcgccaacctgcggtggtgtcgcaagttgaatatctttcggcacaatctggccggtcagcgcgtttaagctttgtgcaccaacggcattcagcatttcttgctgttgcgcggcgtccggtccgatatggcgttcaataaaagcgccgctgttttcaagctggcttaacgtctgtgtcatgagcgatggttcctgaaacgtgcagtgaattgtgaacctctctccttacgaagagagtgagggtgaggcataaattttcctcaccctgatcctctcccgcagaagaggaataaagccgttactcgtcttctaacaatgcttcgtatgcggtcgcatccagcagactttccagttcgctttcatcgctggctttgattttaaagatccagccgcctgcatacggttcgctgttcaccagttccggggaatcgctcagtgcgtcgtttaccgccacgatttcaccgcttactggcgcataaatgtcactcgccgcttttacgctttcggcaaccgcgcagtcatcgcccgcgctaaccgttgcgcccacttccggcaggtcaacaaacaccatatcgcctaacagctcctgagcatgttcggtaataccaacggtgtaagtgccgtcggcttctttacgcagccattcgtgttctttgctgtatttcagttctgctggtacgttgctcatcaatcaatctccaaaaaagtaaatcacgcgacggctttgccgttacgcacaaaaacaggttttgtcactttaaccggcatttcacggttgcgaatttgcacaatcgccgtttcgccaataccttccggcacgcgcgccagcgcaatgctgtaacccagcgtcggggagaaagtaccgctggtgataatgccttcatgctggttgccctgcgcatcggtaaagcgtaccggcagttcattacgcagcacgcctttttcggtcatcaccagaccaaccagtttttctgtaccatgctcacgctgcacttccagggcttcacgaccgataaagtcacgatctgccggttcccaggcgatggtccagcccatgttggcggctaaaggagagatggtttcgtccatctcctgaccataaagattcatgcccgcttccagacgcagcgtgtcacgcgcgcccaagccacatggcttaacacccgcttccaccagcgcacgccagaaatcggccgctttttcattgggcagcgcaatttcatagcccgcttcaccggtataaccagtggtggcaataaacagatcgcccgcctgcacgccaaagaacggtttcatcccttccaccgcctgacgctgggcgtcattaaacagtgtggcagcttttgcctgcgcattcggcccttgcacggcaatcatggaaaggtcatcacgaacggtaatttcgatgccgaaaggttcagcgtgttgggtaatccaggagaggtctttttcgcgggtggcggagttaacaacgaggcggaagaaatcttcagtaaagtagtagacgatgaggtcatctatcacaccgccagaggcattcaacatcccgctgtaaagggctttgccgcttttggtgagcttcgccacatcgttcgccagcagataacgcagaaactcccgggtgcggctgccgcgaagatcgacgatggtcatatgactcacatcaaacattccggcatcggtacgtaccgcatgatgttcgtcgatttggctaccgtaatgcagcggcatcatccagccgtggaaatccaccatgcgagcgccgcaaagcgtgtgttgttcgtacaaaggagtctgttgtgccatcttgtcctcattgaataagcggggctgacaactttttcatggtgaaattatcaccacgaaacccagcatcggagccactcccggtccccaacgcaatcgttctcttttgcctgaacttaccaccgaaacagactgttaaccataaggtaaaattgatcatcacattagcttatggttaaaaaatgcaaaaatcgcgacagaataaaaaaccaaaaaatacaccagtttctatacaaagatgatgtgatgagaaagtcaatttgaataagacaatattaagagctaaaaaaatgtcaaaaaacactaaatcaaaaaataatggcattagaaaatataatgcgaaaacggaggtgaaattagtttatttcaaatgaggaaaatctcccggcgaaaaaaccgggagatgaaagtgtgatgggtatcaaataaacaacagaggagaaatttttaacgcagccattcaggcaaatcgtttaatcccattgcctggcggataagttgcggcttaacgccaggaagcgtgtcggccagtttcaaaccaatatcacgcagcagttttttcgccggattggtaccggaaaacagatcgcggaatccctgcataccagccagcatcaacgccgcactgtgcttgcggctacgctcatagcgacgcagataaatgtactgcccgatgtctttcccctgacgatgcaaccgtttcagttcggcaatcagctctgcagcatccataaagccgagatttaccccctgccccgccagcgggtgaatggtatgtgcggcgtcgcccaccagcgccagacggtggctggcaaactggcgcgcataacgccccgtcagtgggaacacctgacgcgcgctctcaaccttgcataagcccaggcgattatcaaaagcgatatttaacgcgcgattaaattcgtcttcacttgcctgctgcatccgctgcgcttcctctgggctcagactccagacaatgctgcaaagatgcggatcgctaagcggtaaaaaggccagaatgccttcgccatggaaaacctgccgcgccaccgcatcatgcggttcttccgtgcgaatggtcgctaccagcgcgtgatgctgataatcccagaaagtcagcggaatatcggctttgttgcgcaaccaggaattagcgccgtccgcgccaatcaccagacgcgccgttaacatgctgccatctttcagcgtcaggaaggtttcattttctccccaggcgacctgctgtaattctgcgggggctaacagagtgatatcactgctctgatgcgctttgttccacagcgcgtagtgaatcacactattttcaacgatatgcccaagatggctatagcccatgctttgatcgtcaaagctaatgtgaccaaagctgtctttgtcccacacttccataccgtgataacagctggccctacgagagagaatgtcctgccagacgccaagacgggtgagtaatttttcgctggcggcattgatagcgctaacgcgcagttgtggtggtgcattcgccgccagaggttcctgtacgcgctgctccagtacggcaacgcgtaagccgctcccctgtaagccacaggcaaccgccagccccaccatgccgccgccaacaatggctacatcaacactttgcattgtttattccttaaaaccgccttcaacgcgccacccaaccgagggtgcgctgcgccagcacatcgcgtgccggggtgaataattccatcgtcatcagcccgatgttgcgcccgacaaccagcggtgcccaacggttggcaaaaagatgtacaaggctgtccgtgacgccaatggttgcttcgcgatcgctctgtcgacgctgctgataacggcacaatacgccgtaatcccccatgtcttctccgcgctcctgcgcctgagtcagggtttccgcaagactcatcacatctcgcataccgaggttaaacccttgcccggcaatcgggtgcagagtttgcgccgcattgcccaccagcacggtacgatgggtaatagatctggcggcgtgggttaacgccagcggataagcactgcgtttaccagcgtgggtaattttcccaagtcgccagccaaaggcgctctggagttcacggcaaaacttctcgtcactccagctcaacacctcttcgcgccgttccagtggatgacaccagaccaggctacagcgtccgtcagacatcggcaacatcgccagcgggccatgttgcgtaaagcgttcaaaagcgcgcccttcatgcgcaacggaagtagcaacgttggcaatcacggccagttgttcgtaaggctcctgctgccagtcaacgccgcacgcggtggctaacgcactatgggtgccatcagctgctaccagcacgcggcccgtcagcgtctcgccactctccagcgtcacttcaacgtgactctgagtacgggcaacgttagccacgcgatcagggcaatgcagcgttacgccaggtgctttacgcagcaatgcaaacagccgttgcccgacattgtgcaattcgacaacctgtcccagcgccgccagttggtaatcttctgcggcgagggtgacaaatccagcgtgaccacgatcgctgacatgcacggtggtgatggcagttgcgcaatccgccagagattgccagacgccgatgcgcgccagttgctgacaggtacccgccgccagcgctatcgctcgtccatcaaagcccggatgagcatgactctctggcgcagtcgcttcaatcaaatgtaccggcagcgccccgtgacttaaccgggaaatagccagcgccagcgtcgcgcccgccatgccgccaccgacgatgattacgctcattgctttctcgcagcaaccatcaacgcttcgatttcttccggctttttcaccacgctggcggtgaggttttcgttaccggtttcggtaatcacaatgtcgtcttcaatacgaatgccgataccgcgatattgttctggcacttctgcatccggcgcaatatacagccctggttctacggtcagtaccatgcccggttccagaatgcggctgcgatcctgaccataaacacccacgtcatggacatccagtcctaaccagtggctaaggccatgcataaagaaaggacgatgggcgttctgagcgatcagttcatcaacatcacctttcaggatgccgagttttaccaggccgctaaccatgatgcgcaccacttcaccagtgacttccagaatggaagttcccggacgatacaggcgcaggctggtttcgagagactccagcacaatgtcgtagatttcacgctgggcctgggtgaatttgccgttgaccgggaaggtgcgggtaatatcgccagcgtaacctttgtattcacaacccgcgtcaatcaacaccaggtcgccgtcgcgcatttcacactcgttttcggtgtagtgcagaatgcagccgttttcaccgctgccgacaatggtgttataggacggatagcgcgcaccgtggcggttaaattcgtggtgaatttcgccttccagatggtactcgaacattcccggacggcatttttccatcgcccgtgtatgtgccatggcggtgatttctcccgcgcggcggagtacggcaatctcttctgggcttttgaacaggcgcatttcatgaacaacaggacgccagtcgatcatcgttgccggtgcggtgagattttgccggctacctttacgcagtttttccagcgcactgttcacgattacatcagcatatgcatattcgccctgggcatggtaaaccacatccaggccgttaagtagttgataaagttgctgattgatttcgctgaatgccagtgcgcggtcaacgcccagtttctctggcgcggcatcctggcctaagcgacggccaaaccagatctccgccgtcaggtcgcgaacgcggttaaacagaacgctgtggttatgagtgtcatcgcttttaatcagcaccagcaccgcttccggttcgttaaagccggtgaagtaccagaagtcactgttctgacgataggggtattcgctgtcggcgctacgtgttacttctggtgcagcaaaaatcagcgcggcgctgccgggttgcatttgctccaccagggcctgacggcgacgctgaaactcttgccgggatatctcactcataacactctccttacgttttttgtttttagtgtagagtcggtttttgtacttctggcgcggtcggttgcggatgagtaaaggtgtcgtggcataacagcgcggcaacacgaacgtattcgatgatctcttcaaggctcatttcaagctcttcctgatcttcgtcttcgtcgtaacccagttgcgcaatgttacgcagatcgtcgatagcttcaccggtttcgccggtcactttatccagcttcggttgcgtaacgccaagaccaagcaggaagtgattgacccaacctgccaatgcatcagcccgatcgaaaacgctgacatcatcgccatcaggcagataaagctgaaaaaggaagccgtcatcctgcagggcatcgctggtggcagagtgcattttacgcagtgcctgtgccagctcatgaccgaaagccatgccttcgttcgtcaggtcgtgaagtagcggtagccaactgctgtcatcgttaccgccacatatcatcccgctgattaaaccatgcatctcagctggggtcagacccgtcccttgttggttcagatactggttcatttcgttgtaaccaggcatttcgttctgtatagacataagcattcgtcgtcaaagggaggaatattcatgatatgctaccactttgggccctggtggaccagaaaagggcttgtctcttctcatcagggtagctatagtgtcgccccttcgcagaccatgggtctaaagacgaaggcagcgcagtcaatcagcaggaaggtggcatgtctgcacaacccgtcgatatccaaatttttggccgtagtctgcgtgtgaactgcccgcctgaccaaagggatgcgttgaatcaggcagcggacgatctgaaccaacggttgcaagatctgaaagaacgcactagagtcacaaatactgaacagttggtcttcattgccgcattgaatatcagctatgagttagcgcaagaaaaagcaaagactcgtgactacgcggcaagtatggaacagcgtattcggatgctgcagcagaccatagaacaagcgttacttgaacaaggtcgcatcaccgaaaaaactaaccaaaactttgaatgacacttttcggtttactgtggtagagtaaccgtgaagacaaaatttctctgagatgttcgcaagcgggccagtcccctgagccgatatttcataccacaagaatgtggcgctccgcggttggtgagcatgctcggtccgtccgagaagccttaaaactgcgacgacacattcaccttgaaccaagggttcaagggttacagcctgcggcggcatctcggagattcccttcttatctggcaccagccatgacgcaactaccagaactcccactgacattatcccgacaagaaatccgcaaaatgattcggcaacgtcgtcgtgcgttaacgccggaacaacagcaggaaatgggtcaacaagccgctacccggatgatgacttatcccccggtggtgatggcacatacggtcgctgtattcctctcttttgatggcgaactcgacacccagccactcatagaacaactctggcgcgccggtaagcgcgtatatcttccagttttgcatccctttagtgccggtaatttgctgttcctgaattaccatccgcaaagcgaactggtgatgaacaggttgaagatccatgagccaaaattggatgtgcgtgacgtgctacccctttcccgattagacgtgctgatcacaccgctggtcgcctttgatgagtacggtcagcgcctgggaatgggcggtggtttttatgatcggaccttacaaaactggcagcactataaaacgcaaccggtgggttatgcgcatgattgtcagttggtggaaaaactccccgttgaagagtgggatatccctcttcctgcggtggttacaccgagcaaagtctgggagtggtaagggcgatacacccgcatcgccctgattgacatcgttgattctttgacctaatttagtgagtaagggtaagggaggattgctcctcccctgagactgactgttaataagcgctgaaacttatgagtaacagtacaatcagtatgatgacaagtcgcatcataacccttctccttcaagccctcgcttcggtgagggctttaccgttacagccccatgctgccctgccatcgtaaatccccattaaataaacacaacgcattgatctgactttgatttattttctggagcagactcgcaaagtagaatgcgcaacgcggcaacggtgtggagaagggataaaaaaacgggcaagtcagtgacctgcccgttgattttcagagaaggggaattagtacagcagacgggcgcgaatggtacccggaatagctttcattgcctgcagcgctttttcggcaacgtcttcgtcggcttcaatatcaataaccacataacccatctgggcggaagtttgcagatattgcgcggcgatgttgacgccctgctcggcgaagattttgttcagcgcagttagcacgcccggacggttttcgtggatgtgcatcagacgacgcccaccgtgcagtggcaggctgacttccgggaagttcaccgcagagagcgtactgccattgtcagaatacttgatcaatttacccgcaacttccaggccgatattctcctgcgcttcctgagtgctaccgccaatgtgtggcgtcagaaggacgttgtcgaattcacacagcggagaggtaaatggatcgctattggtcgccggttccgtcgggaatacgtcgattgccgcccccgccagatgtttgctcgccagcgcatcacacagcgccggaatatccaccacagtaccgcggctagcattaatcagcaggctgccgggcttcattagactaatttctttcgcgcccatcatatttttggtggacggattctctggtacatgcagactcaccacatcgctcatattcagcaggtcagaaagatgctgtacctgagtggcgttgcccagcggcagtttattttcaatatcataaaagtaaacatacattcccaggctttcagccagaatgcccaattgcgtaccaatatgaccgtagccgatgatacccagctttttgccgcgcgcttcaaaagaacccgccgccagtttgttccacacgccacggtgcgctttagcattggcttccggcacgccgcgcaatagcagcagcagttcgccaatcaccagctccgcaacagagcgcgtattactgaacggtgcgttaaataccgggatcccgcgctttgccgccgcatccagatcaacctggtttgttccgatacagaaacagccaatagcgaccagtttttctgcggcgttgatcacgtcttcagtcagatgggtacgggatcgcaggccgatgaagtgggcatcgcggatggattcttttaattgttcatcatccagcgcgcctttgtgaaattcgatgttggtgtaaccagctgcacgaaggctttccagcgccttttggtgcacgccttctaccagcagaaacttaatcttgtctttctccaggcttacctttgccatttacccaatcctgtcttttgaaatgttgtgtgcggatttgcatccgcctttcaacatatcaaaaaataatattgcggcaatatgaacgtttgcgtcgcgatgttgaggaaatatcacgcaaaggtaattcttggatgaatatgctggtttagaggatttatttagagcaatcgacaattgcctggtaaaagcgtgacacatgtcaccaaatttaatgaagagaatttttttaacgggggaggttcccccgtcagatcatttcacaatggttttgacaccgtcaggtgtgccaatcagcgcaacgtccgcgccacggttagcaaacaagccaacagtcaccacgccaggaatcgcatttatggcgttttccatcgctatcgggtcaaggatttccatgccgtggacgtcgaggatcacgttgccattatcggtcaccacgccctgacggtattccggacgaccgcccagtttcaccagctgacgcgccactgcactacgtgccatcgggataacttctactggcagcgggaatttacccagaatatcaacctgcttggaagcgtctgcaatacagataaatttttctgcaacgctagcaatgattttttcacgggtcagcgccgcgccgccgcctttgatcatttgcatgtggccgttgatttcatctgcgccatcaacgtagatgccaaggctgtcgacttcgttgagatcaaaaacgtgaatgccgaggcttttcagtttttcagtggaagcatcactactggaaacggccccttcaatctggcctttcattgtaccgagcgcgtcaataaagtgtgcggcggtggaacctgtacctacaccaacaatggtgccgggctgaacatactgaagtgccgcccatcctactgcttttttcaattcatcctgcgtcatgatcgtttcgcctgtggtatgaaatttcacacgcattatatacaaaaaaagcgattcagaccccgttggcaagccgcgtggttaactcatccataaaatatcgcgcaatggcaggcatcccctttcgccccgcaaataaagcatacaacggtctgggtatgccgctccacggtgcaaacaggcgcaccagttcaccgttcgcaagcccctgtttacaggcaaattgaggcaataacgccacgccattcaacacaaccagggcgcgaactcgctgagcgaaatgcattagcgcaaatccctgatcttttaagctgcgcttttaaccacggatacaaatgttacccgccgacggcttcggtatatgcaacctgacacaaaattgtgtcatagtgcaggaaaaagcatttaccaggagcagacaacagcaatgaaacgcccggactacagaacattacaggcactggatgcggtgatacgtgaacgaggatttgagcgcgcggcacaaaagctgtgcattacacaaagtgccgtcagtcagcgcattaagcaactggaaaatatgttcgggcagccgctgttggtgcgtaccgtaccgccgcgcccgacggaacaagggcaaaaactgctggcactgctgcgccaggtggagttgctggaagaagagtggctgggcgatgaacaaaccggtagcactccgctgctgcttagtctggcggtcaacgccgacagtctggcgacgtggttgcttcctgcactggctcctgtgttggctgatagccctatccgcctcaacttgcaggtagaagatgaaacccgcactcaggaacgtctgcgccgcggcgaagtggtcggcgcggtgagtattcaacatcaggcgctgccgagttgtcttgtcgataagcttggtgcgctcgactatctgttcgtcagcagtaaaccctttgccgaaaaatatttccctaacggcgtaacgcgtagcgcattactgaaagcgccagtggtcgcgtttgaccatcttgacgatatgcaccaggcctttttgcagcaaaacttcgatctgcctccaggcagcgtgccctgccatatcgttaattctagtgaagcgttcgtacaacttgctcgccagggcaccacctgctgtatgatcccgcacctgcaaatcgagaaagagctggccagcggtgaactgattgacttaacgcctgggctatttcaacgacggatgctctactggcaccgctttgctcctgaaagccgcatgatgcgtaaagtcactgatgcgttactcgattatggtcacaaagtccttcgtcaggattaatccatcaaataatgcctgatagcacatatcaggcgttgtcctcacttctttttgtattccttgaatcacatcacaaaatagacaaatctcaggcggcaaaaaacgacgtctgaatgcattttttttgctggcgacaaacccacgtaaaaagctcaccgtaggcgcaaataccctcattttgattgcgttttacggagcaaataatgtctaacgtgcaggagtggcaacagcttgccaacaaggaattgagccgtcgggagaaaactgtcgacagcctggttcatcaaaccgcggaagggatcgccatcaagccgctgtataccgaagccgatctcgataatctggaggtgacaggtacccttcctggtttgccgccctacgttcgtggcccgcgtgccactatgtataccgcccaaccgtggaccatccgtcagtatgctggttttagtacagcaaaagagtccaacgctttttatcgccgtaacctggccgccgggcaaaaaggtctttccgttgcgtttgaccttgccacccaccgtggctacgactccgataacccgcgcgtggcgggcgacgtcggcaaagcgggcgtcgctatcgacaccgtggaagatatgaaagtcctgttcgaccagatcccgctggataaaatgagcgttagcatgaccatgaatggcgcagtgctaccagtactggcgttttatatcgtcgccgcagaagagcaaggtgttacacctgataaactgaccggcaccattcaaaacgatattctcaaagagtacctctgccgcaacacctatatttacccaccaaaaccgagtatgcgcattatcgccgacatcatcgcctggtgttccggcaacatgccgcgatttaataccatcagtatcagcggttaccacatgggtgaagcgggtgccaactgcgtgcagcaggtagcatttacgctcgctgatgggattgagtacatcaaagcagcaatctctgccggactgaaaattgatgacttcgctcctcgcctgagcttcttcttcggcatcggcatggatctgtttatgaacgtcgccatgttgcgtgcggcacgttatttatggagcgaagcggtcagtggatttggcgcacaggacccgaaaagtctggcgctgcgtacccactgccagaccagtggctggagcctgactgaacaggatccgtataacaacgttatccgcaccaccattgaagcgctggctgcgacgctgggcggtactcagagtctgcataccaacgcctttgacgaagcgcttggtttgcctaccgatttcagtgcacgcattgcccgcaacacccagatcatcatccaggaagaaagtgaactctgccgcaccgtcgatccactggccggatcctattacattgagagcctgaccgatcaaatcgtcaaacaagccagagctattatccaacagatcgacgaagccggtggcatggcgaaagcgatcgaagcaggtctgccaaaacgaatgatcgaagaggccagtgcgcgcgaacagagcctgatcgaccagggcaagcgtgtcatcgttggtgtcaacaagtacaaactggatcacgaagacgaaaccgatgtacttgagatcgacaacgtgatggtgcgtaacgagcaaattgctagcctggaacgcattcgcgccacccgtgatgatgccgccgtaaccgccgcgttgaacgccctgactcacgccgcacagcataacgaaaacctgctggctgccgctgttaatgccgctcgcgttcgcgccaccctgggtgaaatttccgatgcgctggaagtcgctttcgaccgttatctggtgccaagccagtgtgttaccggcgtgattgcgcaaagctatcatcagtctgagaaaagcgcctccgagttcgatgccattgttgcgcaaacggagcagttccttgccgacaatggtcgtcgcccgcgcattctgatcgctaagatgggccaggatggacacgatcgcggcgcgaaagtgatcgccagcgcctattccgatctcggtttcgacgtagatttaagcccgatgttctctacacctgaagagatcgcccgcctggccgtagaaaacgacgttcacgtagtgggcgcatccagtctggctgccggtcataaaacgctgatcccggaactggtcgaagcgctgaaaaaatggggacgcgaagatatctgcgtggtcgcgggtggcgtcattccgccgcaggattacgccttcctgcaagagcgcggcgtggcggcgatttatggtccaggtacacctatgctcgacagtgtgcgcgacgtactgaatctgataagccagcatcatgattaatgaagccacgctggcagaaagtattcgccgcttacgtcagggtgagcgtgccacactcgcccaggccatgacgctggtggaaagccgtcacccgcgtcatcaggcactaagtacgcagctgcttgatgccattatgccgtactgcggtaacaccctgcgactgggcgttaccggcacccccggcgcggggaaaagtacctttcttgaggcctttggcatgttgttgattcgagagggattaaaggtcgcggttattgcggtcgatcccagcagcccggtcactggcggtagcattctcggggataaaacccgcatgaatgacctggcgcgtgccgaagcggcgtttattcgcccggtaccatcctccggtcatctgggcggtgccagtcagcgagcgcgggaattaatgctgttatgcgaagcagcgggttatgacgtagtgattgtcgaaacggttggcgtcgggcagagcgaaacagaagtcgcccgcatggtggactgttttatcagcttgcaaattgccggtggcggcgatgatctgcagggcattaaaaaagggctgatggaagtggctgatctgatcgttatcaacaaagacgatggcgataaccataccaatgtcgccattgcccggcatatgtacgagagtgccctgcatattctgcgacgtaaatacgacgaatggcagccacgggttctgacttgtagcgcactggaaaaacgtggaatcgatgagatctggcacgccatcatcgacttcaaaaccgcgctaactgccagtggtcgtttacaacaagtgcggcaacaacaaagcgtggaatggctgcgtaagcagaccgaagaagaagtactgaatcacctgttcgcgaatgaagatttcgatcgctattaccgccagacgcttttagcggtcaaaaacaatacgctcagtccgcgcaccggcctgcggcagctcagtgaatttatccagacgcaatattttgattaaaggaatttttatgtcttatcagtatgttaacgttgtcactatcaacaaagtggcggtcattgagtttaactatggccgaaaacttaatgccttaagtaaagtctttattgatgatcttatgcaggcgttaagcgatctcaaccggccggaaattcgctgtatcattttgcgcgcaccgagtggatccaaagtcttctccgcaggtcacgatattcacgaactgccgtctggcggtcgcgatccgctctcctatgatgatccattgcgtcaaatcacccgcatgatccaaaaattcccgaaaccgatcattagcatggtggaaggtagtgtttggggtggcgcatttgaaatgatcatgagttccgatctgatcatcgccgccagtaccagtaccttcagtatgacgcctgtaaacctcggcgtcccgtataacctggtcggcattcacaacctgacccgcgacgcgggcttccacattgtcaaagagctgatttttaccgctagcccaatcaccgcccagcgcgcgctggctgtcggcatcctcaaccatgttgtggaagtggaagaactggaagatttcaccttacaaatggcgcaccacatctctgagaaagcgccgttagccattgccgttatcaaagaagagctgcgtgtactgggcgaagcacacaccatgaactccgatgaatttgaacgtattcaggggatgcgccgcgcggtgtatgacagcgaagattaccaggaagggatgaacgctttcctcgaaaaacgtaaacctaatttcgttggtcattaatccctgcgaacgaaggagtaaaaatggaaactcagtggacaaggatgaccgccaatgaagcggcagaaattatccagcataacgacatggtggcatttagcggctttaccccggcgggtagcccgaaagccctacccaccgcgattgcccgcagagctaacgaacagcatgaggccaaaaagccgtatcaaattcgccttctgacgggtgcgagtatcagcgccgccgctgacgatgtactttctgacgccgatgctgtttcctggcgtgcgccatatcaaacaagctccggtttacgtaaaaagatcaatcagggcgcggtgagtttcgttgacctgcatttgagcgaagtggcgcaaatggtcaattacggtttcttcggcgacattgatgttgccgtcattgaagcaagcgcactggcaccggatggtcgagtctggttaaccagcgggatcggtaatgcgccgacctggctgctgcgggcgaagaaagtgatcattgaactcaatcactatcacgatccgcgcgttgcagaactggcggatattgtgattcctggcgcgccaccgcggcgcaatagcgtgagcatcttccatgcaatggatcgcgtcggtacccgctatgtgcaaatcgatccgaaaaagattgtcgccgtcgtggaaaccaacttgcccgacgccggtaatatgctggataagcaaaatcccatgtgccagcagattgccgataacgtggtcacgttcttattgcaggaaatggcgcatgggcgtattccgccggaatttctgccgctgcaaagtggcgtgggcaatatcaataatgcggtaatggcgcgtctgggggaaaacccggtaattcctccgtttatgatgtatagcgaagtgctacaggaaagcgtggtgcatttactggaaaccggcaaaatcagcggggccagcgcctccagcctgacaatcagcgccgattccctgcgcaagatttacgacaatatggattactttgccagccgcattgtgttgcgtccgcaggagatttccaataacccggaaatcatccgtcgtctgggcgtcatcgctctgaacgtcggcctggagtttgatatttacgggcatgccaacagtacacacgtagccggggtcgatctgatgaacggcatcggcggcagcggtgattttgaacgcaacgcgtatctgagcatctttatggccccgagcattgctaaagaaggcaagatcagtaccgtcgtgccaatgtgcagccatgttgatcacagcgaacacagcgtcaaagtgatcatcaccgaacaagggatcgccgatctgcgcggtctttccccgcttcaacgcgcccgcactatcattgataattgtgcacatcctatgtatcgggattatctgcatcgctatctggaaaatgcgcctggcggacatattcaccacgatcttagccacgtcttcgacttacaccgtaatttaattgcaaccggcagcatgctgggttaatgactcgtcccgtcacgatcttcagcaatatgctgaagcatcgtggcggtataacgatgatttctgatactataaagatattcctgcatatacatcggcctgtgcggtgcatcaaaatatttcagcgttgccggattcaccagtcgccaggcaaaatgcgggatcaccgtcagaaaatgtccgcgctccacggcgctgattttggccataaaactgtagggacgataaataatggttggattgatcccacaaggtcgcatattcgcatcaatcattgcttcgaagttggcccggttctgaaagcgcatttgtagccagggcagctcctgaagcagctcttgctcttgtcgctcttcataacggcgagaaacgagaaagcctaatcgcagcggtggtagttcactgatagtcaggttttccagttcctgaactcgtgcagatacatgctgtggggagataataaaatctaactggcggtcaaaaagattatcgataacgccattttcgctgaactcaactggctgggcggtcacgccttcatacttatctccgagactaatcaactgatcgaaaataattgtcggataagtattatctatgccaatcacaatttctcgactacgacgcccactgttatggatttcattatcaatcgcagaaagccgttgataaaccgggaacagtttttgatacagttcctgtccggctttattgaggctgatattattatctttgcgggtaaatagcgtatagccaatttgttcttccagcgcggcaatgcttttaccaaatgggctagccgtcatatggattttttctgccgcccgggcaatattattggtttgcgctaataaaatgaaattgcgcatctttttgctaataaaaatgtccatccccctcccccgcatccttgtccgcttaaccgtttcagtcagcctatccttgatgaaaccgcgagcaaagataggtgattacgtcatggttttacagaaaattacagaaaaaggaggcaatatcgggtaaaggcattagcccgacgaatacgtcgggctacaaatattattgtgctgcaggtgttttagcgggttgttgatccacaggttctaactggaagaccacatcgacctgatcatcaaactgaatagcggcctgctcgtaagtttcctgggcggacaccggcgcggcatcggctttcatcatccgcaccattgggctgggctgatagttggaaacatggtagcgcacgctatataccggccccagtttacgatgaaagccgttcgccagttcctgcgcctgatgaatcgcgttatcaatcgctgccttacgcgctttgtctttataggcatccggctgcgccacgcccaggctcacagaacgaatttcgttaagacccgccttcagcgcgccatccagcaaggaattcagtttgtctaactgacggagcgtgacttccaccgttctcacagcgcggtagcctttaaggatacttttaccatcctgataatcataatctggctgggtgcgtaagttcgcactgctgatatcttttttcgcgatctgattgagttcaaggaaggaaatgtattgtgcgacgcgctcatctgcctgtttcttggcagtagcggcatccttcgcggccacgttaacttcaatcgcaagagtggcaatgtctggcaccgcatccacgcttgccgtaccggaggtgacaatatgcggtccatccggcaattcgttagcctgcgctgccatcccgctaatacccattaatgccgccagggcgataactttgaacttcacgttagtctctccgtgttaattgacttgcccaaaattcaggacctctggaggcaagcttagcgcctctgttttatttttccatcagatagcgcttaactgaacaaggcttgtgcatgagcaataccgtctctcgccagctgcaaggcaataaaccacataacacatcccacaaccagattgataatgcgctgtgcttttgccgtgcgcagacgcggtgccagccaggctgcgagaagagccagaccaaagaaccacaggaaagaggcgctaattgtcccgagtgcaaaccagcgttttggttccacatcaagttgcccgccaaggctgcccagtacaacaaaagtatccaggtaaacatgcggattcagccaggtcactgccaacatggtggcgataattttccatctgccttgcttcatgacttcggcgctggctaactcaatattactgctcattgctgttttaaaagcgccaaaaccataccacagcaagaaggctacgccgccccaggtgaccagcgccagcaaccacgggctctgcatcaataacgcgctgccaccaaaaatcccggcgcaaatcaggaccaaatcgctgatagcacaaagtaaggcaatcataatgtggtactgacgacgtatgccctgattcatcacaaaagcattttgtggaccgagcggtaggatcatagccgccccaagtgcaagaccttgaaagtaataagaaaacacgttggatattccgaattaagtatctgatgcagagactatatcgcgggattgttattagcggaaattgataatattaattggcaatcagaaaaactaataagagagaggccagagagtattatctggcctcagcgttgattacgcagctttgtcttctttcacccgcttaaagttcacatccatttgcgggtacgggaagctgataccggcggcatcaaattcacgtttaatacgctccagcacatcccagtacacgttttgcagatcgccgctgttgctccagacgcggaccacgaaattaatgctgcttgcaccaagttcgttcaggcgcacagtcatttcgcgatctttcaaaatgcgatcttcagactggataatattggtcaggatctgcttaacctgatcgatatcggaatcatacgccacgccaataataaattcgttacggcgaactggctcgcgggagaagttaataatatttccggcaataattttaccgttcggaataacgataattttaccgtctgcagtacgcatggtggtggagaaaatctgcacactcagcacagtaccggctacgccgcccaggtcaacatattctccggcacggaacgggcggaacatgacaagtaacacgccagcggccaggttagacagactcccctgcaaagccagaccaacagctaagcctgcggcaccgagtacagcaatgacactcgcggtttgtacacccacgcgtcccagtgcagcgattagcgtaaaggcgataataccgtaacggactaatgcagaaagaaaatcagcaacagtggcatcgattttacgggagatcatcaggcgattcaccgcgttggaaatcatccgcgcgataatcaaaccaacgatgatgatcgcgagtgccgccacgatgtttactgcataacttagcagcagcgcctggttagctaccagccagcttcccgcgccgtttatgctatcgacaacattcaaatcttccattcaatattccttttcaactgactcaaaatggagaaatacactccgccgccttatgacgggcagtctgacaagggtaaacaataaagcataattttgccaaatagatcacagatttctcatctgaatcaccttgcttttggcgaaaaaatccccgcagagcggggctcagacagatatcaatgtgcgctttgtcatgccggatgcggcgtgaacgccttatccggcctacaaaaacctgcaaattcaatatattgcaggatacgtgtaggcctgataagcgtagcgcatcaggcaattttgcttttggcgaaaaaaagacccgcagagcgggccttgagataagcagaaaggaatatcttacagaacgtcgatcgcgttcagttcctggaatgctttctccagacgagcgatcatgctagtctgaccggcacgcagccatacgcgcggatcgtagtatttcttgttcggctgatcttcgcctttcgggttacccagctgaccctgcagataagcttcgttcgctttgtagtagttcagaacgccttcccaggttgcccattgggtatcggtatcgatgttcatttttactacgccgtagcttacggagtctttgatttcctgagcagtagaaccggaaccaccgtggaatacgaagttcaggctgttgtgcggcaggttgtgtttcttggaaacatattcctgagaatcacgcaggatggtcggagtcagaaccacgttacccggcttgtaaacaccgtgtacgttaccgaaggacgctgcgatggtgaaacgcgggctgattttgctcagttcggtgtatgcgtaatcaacgtcttccggctgggtgtacagtgcagaagcgtccatgtggctgttgtccacgccgtcttcttcaccaccggtgcaacccagttcgatttccagagtcatgccgattttggacatgcgctccaggtatttagagcagatttcgatgttctcttgcagagattcttcagacaggtcgatcatgtgagaagagaacagcggcttaccggtagctgcgaagtgtttttcacccgcgtccaacagaccgtcgatccacggcagcagtttcttcgcgcagtggtcagtgtgcaggataaccggaacaccataatgttcagccatctggtgaacgtgatgcgcaccagagatcgcgcccaggatagcagcaccctgcggaacgtcagatttcacgcctttaccagcgataaaggaagcaccaccgttggagaactgaacgataaccggcgctttaactttagcagcggtttccagtacggcgttgatggagtcagtaccgacgcagtttactgctggcagtgcgaagttgttttcttttgctacctggaaaactttctgtacgtcatcaccagtgattacgccaggttttacgaaatcaaaaatcttagacatgtctcttgtcctgtatcgtcgggccttatactcgtcatacttcaagttgcatgtgctgcgtctgcgttcgctcaccccagtcacttacttatgtaagctcctggggattcactctcttgtcgccttcctgcaactcgaattatttagagtatgaaaaattgcgtgctctaaaagcgcgctgaaacaagggcaggtttccctgccctgtgattttttacttcttagcgcgctcttcgagcatcgctactgcaggcagtactttaccttccacgaattcgaggaatgcgccgccgccagtggagatgtaggagattttgtcagcaatgccgaacaggtcgattgctgccagagtgtcgccgccgccagcgatggagaacgcttcgctgtctgcgatagcgttagccacgatttcagtacctttgcggaagttcgggaattcgaacacgccaaccggaccgttccacagaatggttttcgcattcttcaggatttcagccagttcctgagcggaagcatcaccgatatccaggatctgctcgtcagctttcacatcgttaacagatttcagggtagccggtgcagtttcagagaactcggttgctacgcgaacatcagacggaaccgggatgttgcaggtggtcagcagacgtttagcttcgtcaaccaggtcagcttcgtacagggatttacccacatcgtggccttgtgccgcgataaaggtgttagcgataccaccaccaacaatcagctggtcagcgattttagacagggagtccagaacggtcagtttggtagatactttagaaccaccaacgatagccaccatcgggcgagcaggttctttcagtgctttacccagcgcgtccagttcagctgccagcagcgggcctgcgcacgcaacgtcagcgaatttaccgataccgtgagtagaagcctgcgcgcggtgagcagtaccgaatgcgtccattacgaacacgtcacacagtgcagcgtattttttggacagggtttcgtcgtctttcttctcgcctttgttgaagcgaacgttttccagaacaaccagttcaccttcagcaacgtcaacgccgtcgaggtaatctttaaccagacgaaccgggttagacagtttgtctttcaggtagttaacaaccggcagcagagagaattcttcgttgtactcgccttcggtaggacgacccaggtgggaagttaccatcacttttgcgccttgtttcagggccagttcgatggtcggcagagaagcacggatacgcgcgtcgctggttactttcccgtcttttactggtacgttcagatccgcacggataaatacacgtttcccagcaagatccagatcggtcatcttaattacagacatggtgaatcctctcgttgattctaaaagttttgcagacgctgcttgcgtcttacctgaaagcaacagtagccatagctaacgtcgtgtcgagcattcggttagcaaagccccattcgttatcgcaccagaccaacgttttgatcaggtgtgcgccactgacccgggtttgggtgccatcgacaatggcactgtgcggatcgtggttaaaatctacagagaccaacggcaattccgtatagtcaactataccatgaaatgcaccttgtgctgctttttgcagcaacaggttgacttcattggcttttacaggtttcttcaccgtcacgcttaaatcgattgccgtcacatttatggttggcacacgtaccgcaatcgcttcaaagcgatcgttaaattgcggaaaaaatcgtgtgataccggcggccagtttagtatcgaccggaatgatgctctggctggctgcccgggtgcgacgcaggtcaggatggtatgcatcaataacctgttgatcgtgcatggcggagtgaattgtggtcacagtgccggactcaataccgtacgcatcatctaacaatttgatgacgggaattatgcaattcgtggtacaggaagcgttagaaacgatgcggtgttccgcacgaagttgatcctgattgacgccgtaaacaacggtcgcgtcgagatcgttactgccaggatgactaaagagcacttttttggccccggcggcaatatgcgcttcgccatgctcgcgggagccatatacgccggtgcagtcgaggactacatcaacgccaagttcacgccaggggaggctttgcagactacgttcatgcaatacgcggatggcgtcatcaccaacaaaaagttgatcgcgttcctgtcgtacttcccatgcaaaacggccatggctggtgtcatatttcaacaaatgcgccatgcccgcagcatccgccagttcgttgattgccaccacggtaatttccgcccggcgtccggattcatacaaagcacgaaccacattacgcccgatgcgaccgaagccatttatcgctacgcgtacggtcatagatctcctgcaaggttttccctgagcaaatttgccagacagagtaatccagcaaatcgtccggggaaaccttacctgtcgcaaactgcgactgattggttaattgtcgaacatttaatcgactgaaacgcttcagctaggataagcgaaacgtggaataaaaggaatgtttgtccagccgaagaagacatttatctgactcacatcacacttttatccccttttgtgggaagctttattccaggctggcgtaataataaccctacaataactggaataaattgtcagcttgtgaagtgataccggccttcttcagtcatctctactatcagattggcctgacggctattcatcagcacacgctcgacattggggccatcggtgcgggcataaaatgcttcggctacttgccgcgttaatcctcccgcaattttacgactaatcaagcgctcccgcagaatttgagcaggtgcatgaataaaaatagaaaaatcgcagaaagatgccaactccagccacttttcatcatccagtaacaaccagtttccttcgacgatgacgagtggtgcggtaacgtgcaacgcatcttcaacaggatcatgcttttgtcgatcgtactgcggccacgtacaatccccttccacgacctggcgcagattttccgtcagtttcgcaacgtcaaatgtctctggtgcgcctttgaaggggcgcaattgatgcgcatccagccagctattgtaatggtgaaaaccatccatcgggagcgtctgaatagcgggcagttccgggtcttgttgcgcgagatattcccagaaggtggttagggtacttttacccgtccccggcggagcgcaaagaaaaaccaccgtacgccgctgcggatttaccgtctgtaaggccgccaacatgtgcagcaacggtttatgtacattttcaatctcttcgttctggtactgtgcctgtatcttcagcccattcaccgttaattcaattttcacggcgttaattcctttaaggtggtcgttactgccagcgtcagcgccgttttgaccattccgctaaaacgcgcctcactccagacggagaaatcagcgaacttcatcgcttttaacgcgtcatagagcatcgcattgcgggttatgctattgacgttgctgataaaatcccaggtcatgtcatcggcaaatccgggcgtttcatcctgttcgttcaggtaatgccagaactgggaaaaatgcgtgatatcggcgtacaaccatttatccattttcccaacgcataaatcaaacgcagtgcaacatcaatatcgtcaagcgggccgctttgggcgagtaacggcttcactgcatattccacgatctcttcatcgttatcgacaaacaggctcggcagaaactggcgtatcccctggagcaaaatggtatgcgcagttttcataaaactaaataaattgtcctgtgcatccagttgctcaagcacatcatcttctgtcagcgtcgccattggtcttccgatagatcaccatcaatgcagggagtctattatattacacgtttggtccgcgccgccgatcagtaatgtctgcgtccgcaccccattcgccgtctgttggataccgttcaccagctcaccgcccgtcacgcccgtagcgctaaagaggatatcgttccccctcaccagttcatcgaggctgtacacacggttaacgtcaacgcccattgccttgcaacgcttgcgctcctgctctgcaatctgccgattttccgtgtaatcccctttagcctggcaaaagtcaatcagctcggcctgcatatccccgcctaatgctttaacggcacaggcagaaatcacgccttctggcgcaccgccgatggtgtacatcacatcgtaaggattatcctgccagcaggtcagcacgctggcggcgacatcgccatccggcagggcaaaaaccttcacgcccagctgtgttgcttcctcaatcgcggcactcaggcgcggtttatccagcgtaaccatgcgcagcttatccagcggtttgcctaacgctttcgccacgttgcgcaggttgtccgtcagaggcaaagacagatcaatcgcgcccgccgccagccgattaacaaccagctttttcatatacatatcgggcgcatgtaacaggctatctcgaggggcgaaagccatgaccgccagcgcattgctctgccccatcgccaccatccgcgtgccttcaatgggatcaaccgcgatatcgacttctggcccatcgcctttgcccacctcttcgccaatccacagcatcggcgcatggtcaatttctccttcgccgataaccactcgtccacgaaaagcgacgtcgtttaatgcctggcgcatcgcggtgaccgccaggccatcaattttatttttgtcgccacatccggtttgcggccaggcagccaacgctgcctgttccgtaacgcgaaataatggccacgccagggacatcattgcgcggcctccccgatatcaacgccaaattgtgccagcagatatttctcggcctgttcattccagatgccgtgcgtttcctcaaccagccgcgccaactctttaaacagcggatcggttttgcctttttcggcaaaatcggcaatggcagtgagcggcatggtcacgccgttataaatgagttttttaccgccagggatatccggcagattgagcacggtttctggcaccgcatccaggccaccgatatgggtcaccataaagctcggctgtaactgcccagtggcgctaagggcaatcgcctctttcatgtcgtccgtactaccgccagatgtaccgacgacgtgcgtgctgttgtaatggacgttgtagaaattaaacggcactttgaagtttttatccgtcggcccggcaaagaagttcagacagccatcttccgccagtaattcatcagccatctcaacgacagcaggcaccgccgcataaacaaaaatgtcatcgaacccggcatctcctgtcagcgcccgcagcatctggacaggatcgctcatccctttggtattcacatacaccagctcaatgcctttactggccgccagttccaccggcagcagcttctgtacctgcgccagacgtttgtcgtcgatatcgaccaccaccacccggctcggttgtatgccgccgttaatggcgtaatcgatagcgccaatgcccatcggacctgcacacgccagcagtgcaatattgccgccaggtttgacgcccatgcgatgctcataaacatattgcgtggtgtgataattggcatgataagcaccaataatgcagcacataggctctgccaggctcgccgcagcaaaataagagccgtgatacggtaatacgcagcccaaattaatggcgatttcgggaataatcatataagtggcattgccgccaaaatattcgtagctgtagcccgcactatatccgcttggtaaccccatcgccggttgcaatacaaaacgctggccttttttatatttgccagtgagatttttacccacttcgacaataaccccggcacattcatgcccggtaatgaccggatgattttctaaatcgtcgggtacgcgtttatgttcactaccgagtaacgccgctttccaggtgcttaaacagacgctgtcagaaattacactcaccagtaattcattatcggtaatttctggcagttcaaatacgcgcagacggacatcccgcttgccataaatagcagcaactttggttttcatttttacctctgtaatcagtgtttatgttcggcggttaattgattaaataaagtgtcgagttttggatcgccaatatagttattaatcaatatcagtggtttatccgtcacacgtttcacgcgcccttccagactggcatgagtaacgacgatatccgcatccgcaggcacgttttctatggcgtaatgttttacttcaattgccagccccgctttttccaggcgtttacggaaggtggtcgcgcccatcgcactggagcccatccccgcatcgcaaacaaaggcgatacgcttaaccctgcttaagctgaatgcaccctcttgtttcatcgccttaaccgcattggcactctgagcaaactcatcttcgctctccgtttccaccgttttttccatcttcagtatcaggctagtaatagcaaaggacaccagggtacctaccgtaacaccggcaattgtcgccaggaagctgcctttcggcgtcagtgccaggtaagcaaagatagaccccggacttgggccagccaccagaccaccgtccagtaagttaaacatccaggtgccagacataccgcccgcaatcatggcaataatggtcagcggcttcatcagcacatacgggaaatacagttcgtggatcccaccgaggaagtgaataatcatcgccccgggcgcagaacgtttactcatccctttaccaaacaaggtaaacgccagcagcagccccaggcccggacctgggttagaggccaccataaagaagatggatttaccgttaacgctagcctgttgcattcccagcggataatagacgccctgatcgatcgcattattgaggaaaagcactttcgccggttcattgatgacactcaacaatggcagataacccgcatgtaccagcgcctcaatacactctttgacgaaagtattggcaattaacaccgccgggccgataacttcaaaacccagcagacaaaggagcatccccgcgatacctaaactgaagttattgataaccatctcaaaaccggcaggtatgcgtttttccagtgccttatcgacatattttatgaccaacccaccgagcggccccatgatcatactgccaaggaacatcgggatctctgcgccaacgatcacaccaatagtacctattccgcccatgaccgccccgcgtttaccgccgaccagatgaccacctgtagaaccaatcatcacgggcaataaataggtaatcatcgggccgacaattttggcgaaatgttcgttaggcagccaaccggtgggaataaataacgcagtaataaaaccccaggcaataaaagcaccaatattggggatgaccattgcagtcaaaaagcccccaaaagcctggacctttgcacgagcagacttgttttccataatattatcctgtagaggagagagtaattatccgcggctgataatgtccgctaattgtttttcactacttgctgttaagagttgttcgagtatttcttcttcgcacagtaattcacttaacgcctgaatagcgccaatgtggctatcggcatcggcagcagagagtccgatgagtaatttaattggttcgtcattccccggaaaataaacaccttgttcaagtaatgtcaaagacatcccggttttaagcgccccacattccggtcgcgcatgaggcattgccacgcctggtgcgagaatataataagggccattgttaatggtggaatctttaattgcctgaatgtaattctcgctgatatagtttttatccagcaaacttaccatgctgaaatcgatagcttcctgccaatcttttgcactatgtataacactgatactactttctggaaaataatcactaagccgcataaattatccttattttatttttagggtaccgtccggcggtaaaaataaaatactcgtgcggtttaatgaaagcaattgagcagggaaaccggtgttttgaaaacagtgaattattaatttcttatataacattgagttatagatataacaacaaatgtcaatacgcatatcgtgatgcatattacataattgatatttattgcatataaatatttgtgatctacaacacgccttatctattgcttgtccgcaaacggacatatcaaggtaataaaaaaggtcgccgaagcgacctttttacccgaaatgctaattacagcagttcttttgctttcgcaacaacgttatcaacagtgaagccgaactcttcaaacagcagctctgccggagcagattcaccgaaggtggtcataccgacgatagcaccgttcaggccaacatacttgtaccagtagtcagcaatacccgcttctacagcaacgcgtgcagtaaccgctttcggcagtacggattcacggtaagcagcatcctgcttgtcaaatgcgtcggtagacggcatggacaccacgcgcgctttcacgccttcggcagtcagtttttcgtaggcagcaacagccagttcaacttcactaccggtagcgatgaaaatcagttccggctgaccggcgcagtctttcagcacataaccaccgcgcgcgatgtttgccagttgctcttcagttcgttcctgctgcgccaggttctgacgggagaggatcagtgcggtcgggccgtcctgacgctcaacaccgtatttccacgcgaccgcggattcaacctggtcacacggacgccatgtagacatgttcggggttacgcgcagagaagcgacctgctcaaccggctggtgagtcgggccgtcttcgcccagaccgatggagtcgtgggtgtaaaccatcacctgacgctgtctcatcagcgcagccatacgtacggcgttacgtgcgtattccacgaacatcaggaaggtggaggtgtacggcaggaagccaccgtgcagggagataccgttagcaatcgcggtcataccgaactcgcgaacaccgtagtggatgtagttacccgcagcatcttcgttgattgctttagaaccagaccacagggtcaggttagacggcgccaggtcagcagaaccgccgaggaattccggcaacagcggaccgaacgcttcgatagcattctgagacgctttacggctggcgattttcgccggattagcctgcagtttagcgatgaactctttcgctttagcgtcgaagtcagacggcatttcgcctttcatacggcgggtaaattcagcggcttcctgcggataagctttcgcgtaagcagcgaatttctcgttccatgcggattctttcgcctggcctgcttctttcgcatcccactgagcatagatttcagacgggatttcgaacggcgcatatttccagcccagttgttcgcgggtcagggcaatttcagcgtcgcccagcggcgcaccgtgggagtcgtgggtaccggctttgttcggggaaccgaaaccgatgatggttttgcacatcagcagggaaggtttgtcagtcactgcgcgcgcttcttctactgcgcgtttgatagatgccgcgtcatgaccgtcgatgtcgcgaataacgtgccagccgtaagcttcgaaacgcattgcggtgtcgtcggtgaaccagccttcaacgtgaccatcgatagaaataccgttgtcatcgtagaatgcaatcagtttacccagcttcagcgtacccgccagagagcaaacttcgtgggagatgccttccatcatgcagccgtcgcccatgaaggcgtaggtgtagtggtcgacaatgtcgtggcccggacggttaaactgcgccgccagcgttttttctgcaatcgccataccgactgcgttggcaataccctgacccagcggaccggtggtggtttccacaccagcggtgtaacccacttccgggtgacccggagttttagagtgcagctgacggaagtttttcagttcttccatcggcagatcgtaaccggtgaggtgcagcaggctgtagatcagcatggagccgtggccgttggacagcacgaagcggtcacggtcagcccaggacggattctgcgggttgtgtttcaggaaatcacgccacaggacttcggcaatgtcagccatacccataggggcacccgggtgaccggatttggctttctgtactgcgtccatgctcagcgcacgaatagcattggcaagctctttacgactggacattttgactccagatcggatgatgaagggcacgcccttaacgacttgacgacagcgcgttttgggctacgccggaaaatttgccaacaatttaccacaagccgcgcgtcatgtacatggaacatccttttgccgcttcagaaatctctggatcatgctcgcatgttgcgcaatctactcgcccgtccgctgcgcttttccttatactgagactgagcgtcgattcacctgcaaacggcgcatttttagaataatcctgaccttgtgcggaagagaaaacatgaaaattcgcgccttattggtagcaatgagcgtggcaacggtactgactggttgccagaatatggactccaacggactgctcagtagtggagcggaagcttttcaggcttacagtttgagtgatgcgcaggtgaaaaccctgagcgatcaggcatgtcaggagatggacagcaaggcgacgattgcgccagccaatagcgaatacgctaaacgtctgacaactattgccaatgcgctaggcaacaatatcaacggtcagccggtaaattacaaagtgtatatggcgaaggatgtgaacgcctttgcaatggctaacggctgtatccgcgtctatagcgggctgatggatatgatgacggataacgaagtcgaagcggtgatcggtcacgaaatggggcacgtggcgttaggccatgtgaaaaaaggaatgcaggtggcacttggtacaaatgccgtgcgagtagctgcggcctctgcgggcgggattgtcggaagtttatctcaaagtcaacttggtaatctgggcgagaaattagtcaatagccaattctcccagcgccaggaagcagaagccgatgattattcttacgatcttctgcgccaacgcggcatcagcccggcaggtcttgccaccagctttgaaaaactggcaaaactggaagaaggtcgccaaagcagtatgtttgacgaccatcctgcatccgccgaacgcgcccagcatattcgcgatcgcatgagcgcggatgggattaagtaaagcctggtggtgtcgaacgtaggtcagataaggcgttcacgccgcatctgacatgaatggcacatttgttaccttgtgcgcattgccggatgcgatgctggcgcatcttatccggcctacgggtgccgaacgtaggtcggataaggcgttcacgccgcatccgacattaatggcacgttttacccgtgcgcatcgcatctggtgcttactcgccctttttcgccgcctgaatatacagcatttccagcgccagcgttgccgctgccagagcagtgatttcgctctgatcgtatgccggagccacttccactacgtccatcccaacaatgttgagatctttcaggccgcgtaccagtttaatagcgcgatcggaggtcaggccgccaatcactggcgtaccggtgcctggtgcaaaagcaggatccaggcagtcgatatcaaaagtcaggtaaaccggcatatcacccacaatctgtttcacttgggcgataacgtcatccacgctgcgatcgttcacctggcaggcgtccagcacggtaaagccgttgtctttatcaaactcggtacgaataccaatctgcacggaatgattcgggtcgatcagaccttctttcggcgcggtatagaacatagtgccgtggtcaaattcacaaccgttcgcataggtatcggtgtgggcgtcaaagtgtaccagcgccattttgccgaaatgcttcgcatgagcacgcagcagcggcagcgtaacaaagtggtcaccaccgaaagagagcatacgcttaccggcagccagcagcttctcggcgtgcgcctgcagcttttcgctcatctcacgggcatcgccaaaggcatataccagatcgccgcagtccacgacgttcagacgctcacgcatgtcgaaattccacgggaagcggttgtgttcccaggccagattcgtgctaacctgacggatcgctgccggaccgtggcgaccacccgcacgaccagaagtggccatatcgaacggcacgccagtaatcacccagtctgcatcgctgtcatacggctggaagttcatcggcaggcgtaaaaaaccaaaggcattggaaaccagactgttatcgtattgatgacctaaggtgctcatggatggactcctattacaaagtcgatataaaaaaacccttccgcgtcgttaggcccgacgaggaagggttggatttgtcacaataaattgtggcggattatcaccgctaaattaagcggattcaagtaacacaggacttactcatcttcaagataagtataaccgtacaaacctgcctcgaactcttcaaggaactgttgttgcagttcagcatcaagatcggttttcttcacttgatcgcggaactgggttaacagcgttttcggatcgagctgtacatattgcagcatgtccgccacggtatcgccttcgtcagacagttctacttctacgctaccgtcagggaagacgaacacgtcaaccgcttcggtatcaccgaacaggttgtgcatgttgccgaggatctcctgatatgcgccgaccataaagaaaccgagcatcggcggattctctggatcgtactccggcattggcattgtcgtggcaataccgtcaccatcaatatagtggtcgatagcaccgtcagagtcacaggtaatatccagcagcacagcgcgacgttccggcacttgatccagcccttccagcggcagaaccgggaacaactggtcgatcccccatgcgtccggcatgctctggaacaggctgaagttgacgtacattttgtccgccatacgttcctgcagctcgtcgataatcggacgatgagcacggttttgcggatccagctgcttttgcacttcatggcacatgctcaaataaagctgctcagcccatgcacgttcttgcaggctaaagatgccggaagagtagccgatatgaatgtcgtgcagatccatctgactgtcgtgtaaccattcacgcagagaacggcgagttcccggttcgtgcatctcctgccaggtttcccacatgctttgcagcgcgcgcggcgcatcttctgcaggcgcggtcggcaccgtgtattcgttacgttccacgccgatgatattagacaccagcacggtgtgatgcgcagtcaccgcacgaccgctttcggtgattaccgtcggatgcggcagaccgttttcttcacacgcatcgccaatcgcccagataatgttgttggcgtattcattgaggccgtagttcacgctacagtcggactggctacgagtaccttcataatccacgcccagaccgccgccgacgtcgaagcactgaatattgacgcccagcttgtgcagttccacatagaaacgcgcggattcacgaacgcctgtcgcgatatcgcgaatattcgccatctggctaccgaggtggaagtgcagtagttgcaggctgtcgagacgcccggcttcacgcagggtttcaaccagttgcagtacctgagtcgcagccaggccgaacttgcttttttccccgccggaggactgccatttaccgctaccctggctagccagacgtgcacgcacgcccagacgaggaacgacattcagacgttctgcttcatccagcacaatggcgatttcactcatcttctcaatgaccagatagaccttgtgccccatcttctcgccaattaatgccaggcggatatattcgcggtctttataaccgttgcagacgatgacgctacgggtcatgccagcatgtgccagtactgccatcaactcggctttggaaccggcttccagacccagcggttcgccgctatgaatcagggactcaatcacgcggcggtgctggttaactttgatcggataaacaaggaagtaatcgccgttatagccgtaggattccctcgcacgtttgaacgcggcgttaatggaacgcaaacggtgctgcaggatctgtgggaaacagaacagtgcaggcagacgctggccctgtgcttcacgagttttcactaactgcgcgagatcgacgcgagcttccgggacgtccgggtccgggcacacgctaatgtggcccagctcgttaacgtcatagtagttattgccccaccaggcaatattgtaagtacgcagcatcttgctggcttcctgggagctcattgcaacctcctgcatggagcgtagtacaccgtgttcgcccgcactgctaggcaaacccatagacatgtcgtcagacatagcgaacctcaaattattttattaagtgtaaaacagttaacgactatcgcagcctggaactggcttaacaacccataagcacatggattttccagcagactatgctgacgctccaactgcgcaaccggtttctttttcataacattattaagcacataaccgaacgtaagtgtgaaagttcggcgaaaccacgagaaaactcttgtttttacaagagcgcccttgttcagtcctcagtaactgtaaccagctcttgaatcctgagaagcgccgagatgggtatagcaagcgcaggtatgcaaagcagagatgcagagtgcggggaacgaatcttcaccagaacggtgagacaggttaagcagcagacaacggttcattatttcgtaagtcctccacggccgcctgttaagacgaacccacaagccaaaactctgattagtacccggctggaagtggcaacacgaaagaaacgtcgtgtgctttttatttaagccgcgcgccgcgttttataccccacaatggcagaaaattgcaaaagataaatacgcagaatgccggcattgtcaggaaaaatttccagccacgtttttaacagaatgagacagctttcaaaaaaaagtggaaatagggtgaagaattgacctaaaatagccatccagatgttaatccatccataccgattaacactcagactgccagtgtttttaacctgcagagtcgtggtaggatccgctaccacagaaaatccacacaacagtttgagctaaccaaattctctttaggtgatattaaatatggcaaaacacctttttacgtccgagtccgtctctgaagggcatcctgacaaaattgctgaccaaatttctgatgccgttttagacgcgatcctcgaacaggatccgaaagcacgcgttgcttgcgaaacctacgtaaaaaccggcatggttttagttggcggcgaaatcaccaccagcgcctgggtagacatcgaagagatcacccgtaacaccgttcgcgaaattggctatgtgcattccgacatgggctttgacgctaactcctgtgcggttctgagcgctatcggcaaacagtctcctgacatcaaccagggcgttgaccgtgccgatccgctggaacagggcgcgggtgaccagggtctgatgtttggctacgcaactaatgaaaccgacgtgctgatgccagcacctatcacctatgcacaccgtctggtacagcgtcaggctgaagtgcgtaaaaacggcactctgccgtggctgcgcccggacgcgaaaagccaggtgacttttcagtatgacgacggcaaaatcgttggtatcgatgctgtcgtgctttccactcagcactctgaagagatcgaccagaaaagcctgcaagaagcggtaatggaagagatcatcaagccaattctgcccgctgaatggctgacttctgccaccaaattcttcatcaacccgaccggtcgtttcgttatcggtggcccaatgggtgactgcggtctgactggtcgtaaaattatcgttgatacctacggcggcatggcgcgtcacggtggcggtgcattctctggtaaagatccaagtaaagtggaccgttccgcagcctacgcagcacgttatgtcgcgaaaaacatcgttgctgctggcctggccgatcgttgtgaaattcaggtttcctacgcaatcggcgtggctgaaccgacctccatcatggtagaaactttcggtactgagaaagtgccttctgaacaactgaccctgctggtacgtgagttcttcgacctgcgcccatacggtctgattcagatgctggatctgctgcacccgatctacaaagaaaccgcagcatacggtcactttggtcgtgaacatttcccgtgggaaaaaaccgacaaagcgcagctgctgcgcgatgctgccggtctgaagtaatctttcttcacctgcgttcaaaggccagcctcgcgctggcctttttcttttggataggcgttcacgccgcatccggcaaaaaaaccgcccgcacaataacatcattcttcctgatcacgtttcaccgcagattatcatcacaactgaaaccgattacaccaaccacaacagacaaagatttgtaatattttcatattattattcggttttcacagttgttacatttcttttcagtaaagtcttaattgcagataacagcgtttaatctatgatgatataactcaattattttcatgcacttaaatcataactaagataaatgttagtgtaagcgattacactgatgtgatttgcttcacatctttttacgtcgtactcacctatcttaattcacaataaaaaataaccatattggagggcatcatgcctgacgctaaaaaacaggggcggagtaacaaggcaatgacgtttttcgtctgcttccttgccgctctggcgggattactctttggcctggatatcggtgtaattgctggcgcactgccgtttattgcagatgaattccagattactagccacacgcaagaatgggtcgtaagctccatgatgttcggtgcggcagtcggtgcggtgggcagcggctggctctcctttaaactcgggcgcaaaaagagcctgatgatcggcgcaattttgtttgttgccggtagcctgttctctgcggctgcgccaaacgttgaagtactgattctttcccgcgttctactggggctggcggtgggtgtggcctcttataccgcaccgctgtacctctctgaaattgcgccggaaaaaattcgtggcagtatgatcagcatgtatcagttgatgatcactatcgggatcctcggtgcttatctttctgataccgccttcagctacaccggtgcatggcgctggatgctgggtgtgattatcatcccggcaattttgctgctgattggtgtcttcttcctgccagacagcccacgttggtttgccgccaaacgccgttttgttgatgccgaacgcgtgctgctacgcctgcgtgacaccagcgcggaagcgaaacgcgaactggatgaaatccgtgaaagtttgcaggttaaacagagtggctgggcgctgtttaaagagaacagcaacttccgccgcgcggtgttccttggcgtactgttgcaggtaatgcagcaattcaccgggatgaacgtcatcatgtattacgcgccgaaaatcttcgaactggcgggttataccaacactaccgagcaaatgtgggggaccgtgattgtcggcctgaccaacgtacttgccacctttatcgcaatcggccttgttgaccgctggggacgtaaaccaacgctaacgctgggcttcctggtgatggctgctggcatgggcgtactcggtacaatgatgcatatcggtattcactctccgagcgcgcagtatttcgccatcgccatgctgctgatgtttattgtcggttttgccatgagtgccggtccgctgatttgggtactgtgctccgaaattcagccgctgaaaggccgcgattttggcatcacctgctccactgccaccaactggattgccaacatgatcgttggcgcaacgttcctgaccatgctcaacacgctgggtaacgccaacaccttctgggtgtatgcggctctgaacgtactgtttatcctgctgacattgtggctggtaccggaaaccaaacacgttagcctggaacatattgaacgtaatctgatgaaaggtcgtaaactgcgcgaaataggcgctcacgattaatctccccaagcttcctcccatcgcggaggaagccacctcttgcagtcatcttttcttcgctctatcctctgccgctatgaaaacatcccgtctccctatcgccatccaacaggccgttatgcgtcgcctgcgggaaaaactcgcccaggccaacctgaagctagggcgtaactacccggagccaaaactctcttacacccagcgcggaacctccgccggaacggcctggctggaaagctatgaaattcgcctcaatcccgttttgctgttggaaaacagtgaagcttttattgaagaagtggtaccgcacgaactggcacatttgctggtatggaaacatttcggccgcgtagcgccacatggcaaagagtggaagtggatgatggaaaacgtgctgggtgttcccgcccgtcgtacgcatcagttcgaactgcaatccgtgcgtcgcaacaccttcccctaccgctgcaagtgccaggagcatcagcttaccgtacgccgccataatcgcgtagttcgtggcgaggccgtctatcgctgtgttcactgcggtgaacagctggttgcgaaataaccatctgaactatcaggaactttcctgatttggctgattgcataccaaaacagctttcgctacgttgctggctcgttttaacacggagaagtgcctacactagcgggattctttttgttaacccctaccccacgcgtacaaccgcgtggggagacgacgcggatttttaactatgcgtatcccccgcatttatcatcctgaaccactgaccagccattctcacatcgcgctttgcgaagatgccgccaaccatatcgggcgcgtactgcgcatggggccggggcaggcgttgcaattgtttgacggtagcaaccaggtctttgacgccgaaattaccagcgccggcaaaaaaagcgtggaagtgaaggtgctggaaggccagatcgacgatcgcgaatctccgctgcatattcacctcggtcaggtgatgagccgtggtgaaaaaatggaatttactatccagaaaagcatcgaactcggtgtaagcctcattacgccacttttttctgagcgctgcggcgttaaactggatagtgaacgtctgaacaagaagcttcagcagtggcagaagattgcaattgctgcctgtgagcagtgtggtcgtaaccgggtgccggaaatccgtccagcgatggatctggaagcctggtgtgcagagcaggatgaaggactgaaactgaatcttcacccgcgcgccagtaacagcatcaatacgttgccgttaccggttgaacgcgtccgcctgctgattggcccggaaggcggtttaagcgcagatgaaattgccatgactgcccgctatcaatttactgatatcctgttgggacctcgcgttttgcgtacagagacaactgcgctcaccgccattaccgcgctacaagtacgatttggcgatttgggctaacggagaagaataatgatcaagctcggcatcgtgatggaccccatcgcaaacatcaacatcaagaaagattccagttttgctatgttgctggaagcacagcgtcgtggttacgaacttcactatatggagatgggcgatctgtatctgatcaatggtgaagcccgcgcccatacccgcacgctgaacgtgaagcagaactacgaagagtggtttagcttcgtcggtgaacaggatctgccgctggccgatctcgatgtgatcctgatgcgtaaagacccgccgtttgataccgagtttatctacgcgacctatattctggaacgtgccgaagagaaagggacgctgatcgttaacaagccgcagagcctgcgcgactgtaacgagaaactgtttaccgcctggttctctgacttaacgccagaaacgctggttacgcgcaataaagcgcagctaaaagcgttctgggagaaacacagcgacatcattcttaagccgctggacggtatgggcggcgcgagcattttccgcgtgaaagaaggcgatccaaacctcggcgtgattgccgaaaccctgactgagcatggcactcgctactgcatggcgcaaaattacctgccagccattaaagatggcgacaaacgcgtgctggtggtggatggcgagccggtaccgtactgcctggcgcgtattccgcaggggggcgaaacccgtggcaatctggctgccggtggtcgcggtgaacctcgtccgctgacggaaagtgactggaaaatcgcccgtcagatcgggccgacgctgaaagaaaaagggctgatttttgttggtctggatatcatcggcgaccgtctgactgaaattaacgtcaccagcccaacctgtattcgtgagattgaagcagagtttccggtgagcatcaccggaatgttaatggatgccatcgaagcacgtttacagcagcagtaacccaccttagcgagaaggatctcgttgagactctgagtgacagcgcccttctttccacgcatactgggcgctgttgcttttttgaaccaggaaacagaacctctgacaatgaatttacagcatcactttcttattgccatgcctgctctccaggatccgattttccgtcgttccgtggtctacatttgcgaacataataccaatggtgcaatggggatcatcgtcaacaagccgctggaaaatctcaaaattgaagggattctggaaaagctgaagatcacgccggagccgcgtgatgaaagtatccgtctggataaaccggttatgctcggcggtccgctggctgaagatcgcgggtttattttgcatactccgccctccaattttgcttccagcattcgcattagtgacaacacggtaatgaccacttcccgcgatgtgctggaaacgctcggcaccgataaacaaccgtctgacgtattggtggctctgggttatgcctcctgggagaaaggtcaactggaacaagaaattctcgataacgcgtggctaacggccccggcagatctgaatattctgttcaaaacgccgattgccgaccgctggcgcgaggcggcaaaactgattggtgtggatattctcaccatgcctggtgtggcaggacacgcctgatgagtggaaccttactcgccttcgacttcggcaccaaaagcattggcgtagcggtcggccaacgcattaccggcaccgctcgccctttgcctgcaattaaagcacaggacggtacgccggactggaacattatcgagcgtttactgaaagagtggcagccggacgaaatcatcgtcggtttgccgctgaatatggacggcaccgagcaaccattgactgccagagcgcgtaaatttgccaaccgtattcatggccgtttcggtgttgaagtaaagctccatgacgagcgtcttagcactgtggaagcccgttccggtctgtttgaacagggcggctatcgggcgctcaacaaaggcaaagttgactctgcctctgcggttattattctcgaaagctatttcgagcagggatattaaggcgatttaaacgcctggcggagtgtaaataatatcatcgcgtcttattgccggatgcggcgtgaacaccttatccagcacacatctggcagcggctataggtctgataagacgcgttagcgtcgcatcagacatttattgcctttgtaggcccgataagcttgcgcatcgggcatggcaacgtcacaaacgcccttcccccacccggtgctgataactctgctgaaacgttatcatccccacctgctgcccggtttgaataacatgcggtaactggtgggttttcccttcgcgaatcaaattccccaccgcgggtgtgttaatcagcaattcaaatagcgccacgcgtccttcctgtttatccacttccagcttttgactcagcactgcccgtaaactacctgccagttgattacgcacggggtctttttcctgcgccggaaaactatccaccagtcgctcaactgcctgcgcggcaccacgcgtatgtaatgttgccagcaccaaatgcccggtttctgccgccgtcagtgccagacggattgtctcgctgtcacgcagctctccgagcaaaatcacatcaggatcttcccgcaatgcggcccgcaatccgcttgcgaacgtcatacagtgcaaaccaatttcccgctgctggatcaaacatcgctggctggcatagagatattcaacaggatcttccagcgtcagaatatgcgcatcggcatgttgattgagatagccaaccatcgccgccagcgtggtagatttgccactccccgtcgcccccgtcaccagaatcaggccattctcgctcttgagtaattccggcaataccgttggtgcgccaagctgttcgagctgcgggcagtggctaggtaacagccgtaacgccaggctaatgccatgccgttgcgcgaatgcgctgccacgcaatcgctggttttccgccaggctcacggcaaaatccagctgaccattctccagcaatattgcccgctgatcgtcatccagccactcccgcagtagctcttcgacgtccggcgtatcaaacggcgcagcttccattctgccgcgaatgcgccatcgtgcgggccaggcgctgcacaggtgtagatcgctgacgttatgctttacactaagggccacaatttcttccatattcatactaagatcctcggaaaatgaacgatattgcgcataacctggcacaggtccgggacaaaatcagtgcggctgcaacgcgttgcggccgttctccagaagaaattacgctgcttgcagtcagtaaaacaaaacctgcgagcgccatcgcagaagccattgatgccgggcagcgtcaatttggtgaaaactacgttcaggaaggggtagataaaattcgccactttcaggaactgggcgtaacaggattagaatggcattttattggcccgttgcagtctaataaaagccgcctggtggcagagcatttcgactggtgtcataccatcgaccgtttgcgcatcgctacccgtctcaacgaccagcgcccggcagaacttccccctcttaacgttctgattcaaattaacattagtgatgaaaacagtaagtccgggattcaactggctgaactggacgagctggcagctgcggtcgctgaactaccgcgtttacgtctgcgcgggttgatggcaatccctgcgcctgagagtgaatatgtaaggcagtttgaagttgcacgccaaatggctgtagcatttgccggactgaaaacgcgctacccgcatatcgacacgctctctctgggaatgagcgacgatatggaagccgccattgcggcaggtagcacgatggttcgtatcggcactgcaatttttggtgcgcgtgattactctaaaaaataaggaattaaaggaacgccatgaatacgttgactttcctgcttagtacggtcattgagctgtataccatggtgctgttattacgcatctggatgcagtgggctcattgtgatttttacaaccccttcagtcagtttgtagtgaaggtaacgcagccaattatcgggccactgcgccgcgttattccggcaatggggccaattgacagcgccagcctgctggttgcctatattctcagttttatcaaagccatcgtgctgtttaaagtggtgaccttcctgccaatcatctggattgccggtttactgattctgctgaaaaccatcggcctgctgattttctgggtcctgctggtgatggcgattatgagctgggtaagccaggggcgtagcccgattgaatacgtgctgattcagctggccgatccgctgctgcgcccgattcgccgcctgctaccggcaatgggtgggattgatttcagcccgatgatcctcgttctgctgctgtatgtcatcaatatgggtgtcgcagaagtattacaggcaaccggaaatatgctgctgccagggctgtggatggcgttatgaatgccgtaacagttaatgatgacggtctggttttacggctctatattcagccgaaagccagccgtgattctattgtcggtttacatggcgacgaagttaaagtcgccattaccgcgccgccggttgacggccaggccaacagtcatctggtgaagtttctcggtaagcaattccgggttgccaaaagccaggtggtgattgaaaaaggcgaacttggccgccacaaacaaattaaaatcattaatccgcaacaaatcccgccagaaatcgcggcgttaattaattaagtatcctatgcaaaaagttgtcctcgcaaccggcaatgtcggtaaagtgcgtgagctggcgagcctgcttagcgacttcggtcttgatatcgtggcccaaacagacctcggcgttgattccgctgaagaaaccggcctgacctttatcgaaaacgcgattctgaaagcgcgccatgcggcaaaagtgaccgctttaccggcaattgccgacgactctggtctggcggtagatgtgcttggcggcgcgccgggcatttactccgcgcgttattccggtgaagacgcgaccgatcaaaagaatctgcaaaaactgctggaaacaatgaaagacgtaccggacgaccaacgtcaggcgcgtttccactgcgtgctggtatatctgcgtcacgcggaagatcccactccgctggtatgccacggtagctggccgggcgtgattactcgtgaaccagcgggcactggtggctttggttatgatccaatcttcttcgtaccttccgaagggaaaaccgccgccgaactgacccgcgaagaaaagagcgccatttcccaccgtggtcaggcgttgaaactgctgctggacgctttacgtaatggttaaattacctccgctgagtctctacattcacatcccgtggtgcgtgcagaaatgcccgtactgcgatttcaactctcacgcgttgaaaggagaagtgccgcacgacgattatgttcagcatctgcttaacgatctggacaacgatgtggcttacgctcagggccgtgaagtaaagacaatctttattggcggtggtacgccgagcctgctttccggcccggcgatgcaaacgctgctggacggcgtgcgtgcgcgtttgccgctggcagcggatgcagaaattactatggaagcgaaccctggcacggtagaagccgatcgctttgtcgattatcagcgtgctggtgtgaaccgcatctctattggtgtgcagagttttagcgaagaaaagctgaaacgacttgggcgtattcatggcccgcaagaagcgaaacgcgcggcgaagctggcgagcggtttagggttacgtagctttaaccttgatttgatgcatgggctgccggatcaaagtctggaagaggcgcttggcgatctacgccaggccattgaactgaatccgccgcatctttcctggtatcaactgaccatcgaacccaatacgctgtttggtagccgaccaccggtgctgccggacgatgacgcgttgtgggatatattcgaacaggggcatcagttattaaccgcagcgggttatcagcaatatgaaacttccgcttacgccaaacccggttatcagtgccagcacaatctcaactactggcgctttggtgactacatcggtattggctgcggcgcacacggcaaagtgaccttcccggatgggcgcattctgcgtaccaccaaaacgcgtcatccgcgtggttttatgcaaggaaggtatctggaaagccagcgtgatgtcgaagccacagataagccgtttgagttctttatgaatcgcttccgtctgctggaggccgcgccgcgcgtggagtttattgcgtataccgggctttgcgaagatgtgattcgcccacagttagacgaggcgattgcccagggttatctcaccgaatgtgcggattactggcagataacggaacatgggaagctgtttttaaatagcctgctggagctttttctggctgagtaaacttgtattgccggatgcggcgtgaacgccttatccagccgacatgtggcagcggttgtaggtctgataagacgcgcaagcgtcgcatcagacgttgattgccggatgcggggtcaacgccgcatcctgctacaaatcgtgcactatatcaaacttacttaatcaccccattgcgccgcagttgttcggtatcttttttccagcgttcattagcttggttgatatcgtcaattttcatcaaaatcgcgacttttttactgtttatttcactaactttcatcgttaacggatattgccctttttcgagcgttacccagtcatcctgcaatttacggctaagtttttgactttgcagaaaagtctgtcgccgttgttcgttgatatcgaaatctcgtttctgctgaatcggcacttcataacactcttcactctgtttatgacatgccgcaatcgccggttgataaacctctttgtcatatttaaccgcgaacgcctcgctatcgttctgtttattaaactcatcacgctgttggtgaatttttttaaaggcgtcttcgcgggtcatttgcttaccgtttgcatcttttccccaatatgcatccgctgctttctgcgccgccaccatttgcttatcaagcgctttcacttccttttccagcgcaggaatgctgttcttctgggtattcaacgcagattcaagctgactaaagcgataattgaaatcttcgctattcacgatcagatatttattattcgttttgatatcgtcgaccacccgcccacgatcgctggctgccgcctgaaaagagtaaaagttcacgctccagccagacgcgggcgttcctttactggttaacatcgcgctgaattttaccggtttatctttcgtccaggtctgttcgagcagttcgtaatctgccaactgaccgacccaggtatagagatcgtcactggaagagacatcgccttccgcactccaggtggcctgattacccttagcatcaagattttttaaggtgatagcatcaagcttgagaatgccgtgatactgctttttgaattgatcttttaagatattttcagttggcggttcgccatctgcccaggcattaccagtcatcaacataagcagtgccgtgccaacaatccattgctttttcacccgaaaaacctcacgcggaataatttattccggtgattatcattagggtaattaaaattggcaatggacgtgagtctgaagtgaaaaagccccggcacgataccggggcgaggcgattagtactgattgaagatctgctggatctgctgcggatctttggtttgcgtcagagccagttgcagcagaacgcgcgctttttgcgggttcagcgtgccagaggcgacgaagccgtatttcgcatcatccacttcggcatcctgagtggtagcgcccgtcggtacgcgggaagaacgcacgactgcagtaccggttttcgcggcggtcgccagcgtgtcgaacacagatttatacaggttgccgttacccacaccagcgctaacgatgccatcatagcccgcatctaccagtgctttagccggaagatcggatgcgttagcgtagttataaacaatgccgactttcggcagttcattcagcttagagacatcgaatggcgtgtcgctggtatgcttacgtgccggggtacgctggtagtcaatcttaccgttgtgaatgtaacccagaggaccgtagttaacagacttgaaggtcgctacgtcggtggtgttggttttggtgacgtcacggccatcaagcacggtgtcattcatcactaccagcacgccacggttggcggaggctttatcagctgcggtcactaccgcgttatacaggttgaatggaccgtctgcgctcatagacgtggacggacgcattgcgccgaccatcaccaccggtttgtcgcatttcaccgtcaggtcgaggaagtaagcagtttcttccatcgtgtcggtaccgtgggtaatgacgaagccgtcggtcttatcgcagtcggtgttaatttttttcgccagtgtcagccagacattatcgttcatgtcctgggagccgatattcactacctgctcgcctttaacgttcgcaatgtcttttagttgcggcaccgcattaaccagattttctacgccaactttacccactgtgtagttagatttggttgcggagtcaccaccaccggcaatggtcccgccggttgctaaaatggtgatattgggtaatgccaatgctgcaccactaaaacccataaccagtgcggcaagtgccgtctttttgaaaaactccatttcattcctccagttacgtgaacgctacgcattatcccttagctctgtatgggaaatttgacgttaaacaatttacaacgtgaatatattttggagatctacaaagttagaggcaggtaacaaaacgaagaattaaacggcataaaaaagtattatgccgtcttaaaatagaggattattttaaattcccgaccagggctttgcggctatcttccagagtcacaacgcggctacaaacatctttgccaaactgctggaaatctttttcctgctttttccactcggtttggatactggattgcagcccccccaggcttcccagcacattctgtaatgggttaccgccgctttttcagcaccgctttcgcgcccatttcattaatgctgtcctgtaaaattccacccattgcctgattcactaattgctggccttcggcgcgaacctgatcaatggctttatagtgaaacgtcaggccatcgctgcgcgtttcaataatgcggttcatctgctctttcagctgcgcatcaagtttggtcagacggctgcgcattttgctgctttcgcccatctcctgaacgataattttatccagagcaatacgggctttctcgacgcggcttttcgcgccttcatcaatccacggcagcgtgctgcgtagttcagcctgataatccttcgcctgctcgcgctgggcggcattcagggaatattgcttaccgttatacatcacgttgccgtctggcgtgatcaccagattgccgttttcgcccttcacctgcacggtttgcgggctgacaatcacatcgtcacgcggcgtgacgctgcactggtagtcggcgtgagcggtcattgccgtcacactaagtgctgccgccagcagcattttgcgcatcatagtcttccctcaagaaaaaatcaggccagcatttgctggccccagattgataacaaagtacgcgttttccatgccggatgcggcgtaaacaccttatcccgcctactcgatcgtgcatctttccaggcctgataagcgtagcgcatcaggcagttttgcatttgtcatcgcccgtatgctttcttagtcccaccaaacgtcgaaaagttcgctggtgcgtacctcatccagtttgcgctcttccagccacttacgcacaatcgcctgatgttcttcggtgcatttgccgatttcctgcatgcagatcagaccttcccaggccagataaccgctgccgtcaaaggccagtttgttcggttcgataacctcgttaataaaatcatcaacggttttatcaatctgttcttcgcttgtaccttccgggaatcgccatgccacgctaaatcctaattcctggaattcgtcgatgtgcatttttttacgcagacgacggctacggttctttgccattatttcaccctctcgaacattaagtcccatactccgtgaccaagacgatgaccacgttgttcaaatttcgtcaccggacgacttgccggacgcggtacgtaatcattgctctcactcaggtttttataaccgtcaatagaagacatcacttcaagcatatgttccgcataaggttcccagtcggtcgccatatggaatacgccccccagctgcagtttgctttttaccagttcggcaaacggcacctgaacgatacggcgtttattatggcgcgctttgtgccacgggtcagggaaaaagagctgcaccatgcgcaaactattgtcaggaatcattttatgcagcacttcaaccgcatcgtgacacatcacgcgcaggttgcttaaaccttcttcatgcgcagaagccaggcacgcaccaacgcccggactatgcacttcaatgccgaggaagtcctgctcagggcgatctttagccattgccaccaggctcgcccccatgccaaaaccaatctcaagcgtcaccggcgcttcacggccaaaaagcgcggggaaatccagcatatcttcgctgaactcaacgcccatcaccggccagtagttttccagcgcatgttcctggcctttggtcagtcgcccctggcggcgcacaaaactacggatacggcgcagtgggcggccgttttcatcaaattccggactaatgacgtcgtttttcataaaggtttagtcgcttgtgaaagtgttctgaaaacgggcattatccaaagttagttgccggatgcaagcatgataaggccgtggctgcggaaagttccggtttacaccctgccgtcgctgtgctgcaatcttgcccccaacaacagtgaattcggtgaccatgcaagcgagccaatttagtgcccaggttctggactggtacgataaatacgggcgaaaaactctgccctggcaaattgacaagacgccctacaaagtatggctcagtgaagtgatgttgcaacaaactcaggttgcgaccgttatcccctattttgaacgctttatggcgcgcttcccgacggtgaccgatctcgccaatgcgccgctcgacgaagttctccacttgtggaccgggcttggctattacgcccgcgcgcgcaatctgcataaagcggcacaacaagtggcgaccttacacggcggtaaattcccggaaacctttgaggaagttgcagcactgccgggcgtcgggcgttccaccgcaggcgcgattctcagcctttctctgggtaagcactttccgattctcgacggtaacgtcaaacgcgtgctggcgcgctgctatgctgtaagcggctggcctgggaaaaaagaggtcgagaataaattatggagtttgagcgagcaggtgacgcccgcggttggcgtggaacggtttaatcaggcgatgatggatttgggtgcgatgatttgtacgcgcagcaaaccgaaatgtagcctctgtccgctacaaaacggatgtattgccgccgccaacaatagctgggcgctttatccgggcaaaaaaccgaaacagacgctgccggagcgcaccggctactttttgctattacagcacgaagatgaagtattgctggcgcagcgtccgccgagcggattgtggggcggtttatactgtttcccgcagtttgccgacgaagaaagtttgcggcagtggctggcgcaacggcagattgctgccgataacctgacgcaactgaccgcgtttcggcataccttcagccatttccacttagatattgtgcctatgtggcttcccgtgagcagtttcaccggctgcatggatgaaggcaatgcgctctggtataacttagcgcaaccgccgagtgttggcctagcggctcccgtggagcgtttgttacagcagttacgcactggcgcgccggtttaacgcgtgagtcgataaagaggatgatttatgagcagaacgattttttgtactttcctgcaacgtgaagcagaaggtcaggattttcagctgtaccccggcgagctgggaaaacgcatctataacgagatctccaaagaagcctgggcgcagtggcagcacaagcaaaccatgctgattaatgaaaagaaactcaacatgatgaatgccgagcaccgcaagctgcttgagcaggagatggtcaacttcctgttcgagggtaaagaggtgcatatcgagggctatacgccggaagataaaaaataaaaacagtgccggagcacgcctccggcaacttgcataaaaacaaacacaacacgcacccggaatgatgaaaaaatatctcgcgctggctttgattgcgccgttgctcatctcctgtagcacgaccaaaaaaggcgatacctataacgaagcctgggtcaaagataccaacggttttgatattctgatggggcaatttgcccacaatattgagaacatctggggcttcaaagaggtggtgatcgctggtcctaaggactacgtgaaatacaccgatcaatatcagacccgcagccacatcaacttcgatgacggtacgattactatcgaaaccatcgccgggacagaacctgccgcgcatttgcgccgggcaattatcaaaacgttattgatgggtgacgatccgagtagcgtcgatctctattccgacgttgatgatattacgattagcaaagaacctttcctttacggtcaggtggtggacaacaccgggcagccgattcgctgggaaggtcgcgcaagcaacttcgcggattatctgctgaaaaaccgtctgaagagccgcagcaacgggctgcgtatcatctacagcgtcaccattaacatggtgccgaaccaccttgataaacgtgcgcacaaatatctcggcatggtccgccaggcgagtcggaaatatggcgttgatgagagcctgattctggcaattatgcagaccgaatcttcctttaacccgtatgcggtcagccgttccgatgcgctgggattaatgcaggtggtacaacatactgccgggaaagatgtgttccgcagccaggggaaatccggcacgccgagccgcagtttcttgtttgatcctgccagcaatattgataccggcaccgcgtatctggcgatgctgaacaatgtttatctcggcggaattgataacccaacaagccggcgttatgccgtcatcaccgcctataacggcggcgcaggcagcgtgctgcgagtctttagcaatgataagattcaggctgccaatattattaacaccatgacgccgggcgatgtttatcagacgctgacgacccgccatccctctgcggaatctcgccgttatctttataaagtgaataccgcgcaaaaatcctaccgccgccgataattccattaaccgcccctgacgatgctcaggggcaaaaatgttatccacatcacaatttcgttttgcaaattgggaatgtttgcaattatttgccacaggtaacaaaaaaccagtccgcgaagttgatagaatcccatcatctcgcacggtcaaatgtgctttttcaaacactcatccgcatcacgatgtgaggaaattaacatgaatcttaagctgcagctgaaaatcctctcttttctgcagttctgtctgtggggaagttggctgacgaccctcggctcctatatgtttgttaccctgaagtttgacggtgcttctattggcgcagtttatagcagtctgggtatcgcagcggtctttatgcctgcgctgctggggattgtggccgacaaatggttaagtgcgaaatgggtatatgccatttgccacaccattggcgctatcacgctgttcatggcggcacaggtcacgacaccggaagcgatgttccttgtgatattgattaacagctttgcttatatgccaacgcttgggttaatcaacaccatctcttactatcgcctgcaaaatgccgggatggatatcgttactgacttcccgccaatccgtatctggggcaccatcggctttatcatggcaatgtgggtggtgagcctgtctggcttcgaattaagccacatgcagctgtatattggcgcagcactttccgccattctggttctgtttaccctgactctgccgcatattccggttgctaaacagcaagcgaatcagagctggacaaccctgctgggcctcgatgcattcgcgctgtttaaaaacaagcgtatggcaatcttctttatcttcagtatgctgctgggcgcggaactgcagattaccaacatgttcggtaataccttcctgcacagcttcgacaaagatccgatgtttgccagcagctttattgtgcagcatgcgagtatcatcatgagcattagccagatctctgaaaccctgttcattctgaccatcccgttcttcttaagccgctacggtattaagaacgtaatgatgatcagtattgtggcgtggatcctgcgttttgcgctgtttgcttacggcgacccgactccgttcggtactgtactgctggtactgagcatgatcgtttacggttgcgcattcgacttcttcaacatctctggtagcgtgtttgtcgaaaaagaagttagcccggcaattcgcgccagtgcacaagggatgttcctgatgatgactaacggcttcggctgtatcctcggcggcatcgtgagcggtaaagttgttgagatgtacacccaaaacggcattaccgactggcagaccgtatggttgattttcgctggttactccgtggttctggccttcgcgttcatggcgatgttcaaatataaacacgttcgtgtcccgacaggcacacagacggttagccactaattacgcaaagaaaaacgggtcgccagaaggtgacccgttttttttattcttacttcaacacataaccgtacaaccgtttcacgccatccgcatcggtttcgctataaacaccttgcagctccgggctaaatcccggcaacaaattcaccccttcttccagtgcaaggaaataacgttgaaccgccccaccccagacttccccgggtaccacgcaaagcacgccaggtggataaggcaacgccccttctgccgcaattcgcccttcggcatcacgaatccgcaccaactccacgtcaccgcgaatataagcgctatgcgcatcctgggggttcatcaccacactcgggaaactctgctggcggaacatcgctttttgtaggtctttgacgtcgaaactgacatacagatcgtgcatctcctgacacaactggcgcagggtgtagtcgcgatagcgcaccggatacttgttataaacgctcggcaacacctcaaccagcgggctgtcatcctcaatatgctgttcaaattgcgccagcatcgccaccagttgtgccagcttctcgtggctttccgccggagttaataaaaacagaatggagttgagatcgcacttctccggcacaatgccgttctcacgcagatagtgcgccagaatcgtcgccggaacgccaaagtcgctatattcgccggtttcggcatcgatacctggtgtagtgagtaacagcttgcacggatcaacaaaatactgatccgcggcatatccttcaaagccgtgccacttcgcccccggctcaaaactgaaaaaacggcggtcgctggctaacacacttgtcggataatcctgccacaatttgccatcaacaacgggcgggataaacgggcggaacagcttacagcgcgcaagaatagccttgcgcgcttcaatccctatctcaacacactcagcccacagccgacgcccactctccccttcatgaattttggcgttaacatccagtgcagcaaacagcggatagaaagggctggtagaagcatggagcataaaggcgttattcaaccgcttatgcgggcaaaaacgcgcctgtccgcggatatggttatcttttttatggatctggctcgtctgactgaatcccgcctgctgtttgtgcacgctctgagtcacaaagatccccggatcgttttcgttaagttctaacagcagcgggctgctatccgccatcatcgggataaattgttcataaccgacccacgcggaatcaaacagaatgtaatcacacagatgcccaacggtatcgatcacctgacgggcgttatagacagtgccgtcataggttcccagctgaataatcgccaggcgatacgggcgcggcaggtcggctttttctggcgcaacgtcgcgaatttgctggcgcagatactcttcattaaaacagtgcgcatcaataccgccaatgaaaccaaacgggttgcgactagcttccagatagaccggcgtcgcccccgcctgaatcagcgcgccgtgatgattgctcttatggttgttacggtcgaagagcaccagatcgccacgcgttaacagcgcattcgtcaccactttattcgctgcgcttgtgccgttcagcacaaaataggttttatcggcatgaaagactttggctgcgaatttctgcgcatctttcgcgcttccttcatgaataagcagatcgcccaattttacgtcagcgttacacatatcggcgcgaaagacgttctcaccaaagaaatcgtaaaaatggcgtccggcaggatgctttttaaaaaacgcaccatgttgatgtccagggcaagcaaaggtgctgttgcccatctcaacgtactgcgtcagcgtgtcataaaacggtggcagcaaattctcttcatactgacaggctgcggattccagctccagccactgctgctcgttgccgttgattaccgccgtaacgcccgcaggtaattcaacagcatgttcggaatacaaaaacaccggtagatgaaaaccggtgcgcttaagcaacgcaagaatgccactgcgactatccgcagcggtaatgacgactgccgcgacgtccgtaaaatcagtatctcccaacgccaccacgcgacgatgagaagaaagtcgggataccagttcactactggcggcaatattcatacttttcataagcgcaaacccgtttcggggaagtaagaataccggacaaggtggaaaaccctgccccatgagatatgggtcaaactggtcaccagctccgaccgccagacatcagtaaaagcagaaacgctctgattttactgttgtcctgcagtgagcgtgcgttaacttcaccgcatgagcagtaacatagaaagggaaacgtttcgcgcgaaacggcgataagcgagagaatgtaaggagatggcgtgcatcgggcaaactccgtacagagaggagaaaattcgcgcaatcatggcacctttcgctaaagcgtgcaagccaggactttgcgaacaaacaagccatcgacggcaccaaacggtcataataagaaaatcaaacaatacagctaacaggaactcttgtggtcatcggcccttttatcaacgctagtgcagtcttactgggtggcgttctcggcgcactgctcagccaacgcttaccggaacgtatccgcgtctccatgacaagtatttttggtctggcaagcctggggattggtattttactggtggtgaaatgtgccaaccttccagcgatggttttagctacgctacttggcgctctaattggcgaaatttgtttgctggagaaaggtgtcaatacagcagtcgccaaagcacaaaatctgtttcgtcacagtcgtaagaagccagcgcatgaatcttttattcagaattatgtcgcgattattgtcctgttttgcgccagcggcaccgggatcttcggggcgatgaacgaagggatgaccggcgatccgagtattttaatcgccaagagttttcttgatttctttacggcgatgatcttcgcctgcagcctgggtattgcggtaagcgtgattagtatcccattactgatcatccagttaacgctggcgtgggctgccgcgctgattttaccgctgaccacaccgagcatgatggcagacttcagcgccgtaggcggtttattgctgctggcaaccggattacgcatctgtggcattaaaatgttcccggtggtcaacatgcttccagcactccttctggcaatgccgctttccgccgcctggaccgcctggtttgcctgacaatgcgtgcaatatcggcaaagtgatgatagattgtgcagtctgcagtaaattgaagaaatttgattgacgagacgaggcgaatcaggtttaatgcgccccgttgcccggatagctcagtcggtagagcaggggattgaaaatccccgtgtccttggttcgattccgagtccgggcaccactaattcttaagaacccgcccacaaggcgggtttttgcttttggatctgacaataaccttcacgaaaaaaattagcttataaagtctgggggaattactctcgccacgttaacgagagtaattttattgatattaatctcctgatactttacccccgtccaaactccagccgctgcacattcaccatcccaggcttctcagcagcactgacatcaatttgtgtcacccgcagcgcatagaacgccattttgaatttacgaacggacgcattatcagtgactttaacggcatgggcaaagtgaaatatcattttttaacgataaaaagagtgttatttcttgtgtatcagacaataagcattcattcaaaacctttagaaataatcaaaacacaggtattccactggttaatatattcacatatgaaatgaataaatattggaatatataaatattgaatattttgattaatccccgtactgattattcttcataatcagtacggggttgctacaacatgtattactttttcaccacaattaacggttcaatatcactctcttttttgatgaccagactttcatcaccgcgcaaacacgtcccaccgtagttgccgccaacggtgaaggtacatacctgaatgtatttaccgtccactttcggcaaacaccacagttgctgatagatgtttttctgctcggcaaatttaccgctggttttgtccagcacctcttcatgatggctgacgaggtcgatattgctgccacagcgaccggcgatcggtttcactgcgtaacctgttttcaccagttcatcattaacagtgaaatcggtatccagcaggtaacgatggtgcgggaacaggctccagaggatcggcagaatcgctttgttgccggggatcaccgtccacagcggctcaaagaccagcacttccgggcgcagcaatacgtcgataagacgcacttcgttttgcggatgaccggtacggattggcaccgcagcaaactcacggtcgctaacttcacgaatctgatcaaacgcggtttcccacgcccaggttttccacacgcagttaaccagtcgcccttccccatcaatcagttgcccggcagcatcccagcccagttcatccaatccacgcaagatacgcgtttcaaagcccgcctggtgcagcgcctgctccataaactgcgcgtgatagttttcctcgatatctttgtcctgcatgatatggacaaacggacgtgcacgactgtgtttccaggcaccagccaattcgttaatcagcccttccgccggattgaagccgttgcctttatagccctgctccgcccaacgttcgaggatcaagcccgcttcggtatgacaggaggcggagtcggcgttgtactcgtaaaccttcaggccacgctcatccatgcagaaatccatacgaccagtgatcatatggtgacggcgacgctgccaggagagacgcaaacgtggccagaggattttcgggatgtcgaacagcgccagcaggttgtcatctttcagcaccttgtcggttgcgtgaagatacatcaggtgcagctcgttggtggctttaattagctcctgctcggcactctcggtaatggtgtagtaatgataaggatcctgattgatcacctgaccgttggcctgcacataggcgttttgcagcggatctttttcatccagccatttaccgtcaaactggcctttgttttccaggcgcgctccgctgattttcagcagctcgcctgcaatttccggctgcggtaagctgtattcagtatcttccgtctggatcatccagcccagaatggtggtgtcatcaaaagtgtctttcagggtatagcagccgttttcgaccaccatctccagctcgcgcgtccactgttgcccttgcggcaacggggaatgaatcacgttctgttccgcaatacggactttgttgccatgcaattgggtaatgatggcgacatggccagtgtctttaaattcaccgcctttatcccagataagaagcgcacccgcgaccggcgcacgcgggctgccgttaggaaatgcctgcaatggcaggatgttgtcattaaccacttctcgcaggaagcgcaggctgaaaatctcccacgccatacccacgtcagtaaagaccacaccgtaattcagaaagagaaaacggcgagcaaattcaacgcattgccacttgtggcccatatattcgtcgtcgatatagctacggaatacggcgtcatcttcgtattcctgcggatcgagagaactgtaatcactagagtagattgctaccccacctggggcgtagcccaataatgtcccgaacggggcatcctggctggtcgttcctttgctcatcactttacctttaacaatacaacctaagcagttggcgtaattgttgtgctctgattacctgctcagcgacattaaccggacagaggtcagactaatcatacacctcatcgcagcggctggcgcaaagggttaaaaaattcacattctgtacagcaagtgacctgctacactgcttcaacactaccactcagaaggcaactcactatgacagacaatacttatcagcccgcgaaagtctggacgtgggataaatccgctggcggcgcgttcgccaatatcaatcgcccggtttctggtccgacgcatgaaaaaacgctgcccgttggcaaacacccattgcaactttatagcctgggaacgccgaacggtcagaaagtaacgattatgcttgaggagctgctggcgctgggcgttactggtgcagagtacgacgcctggctgattcgtattggcgatggcgatcaattctccagcggctttgtcgaagtgaacccaaacagcaagatcccggcgctgcgcgatcatacgcataatccgccgatccgcgtgtttgaatctggtagcatcctgctttatctggcggagaaatttggctacttcctgccgcaggatttggcaaagcgtactgaaacgatgaactggctgttctggttacagggcgcggcaccgttcctcggcggtggttttggtcacttttaccattacgcaccggtaaagattgagtacgccatcaaccgctttaccatggaagccaaacgtctgctcgacgtgctggataagcaactggcgcagcataagtttgttgcgggcgatgagtacaccattgcggatatggcgatttggccgtggtttggcaacgtggtgttaggtggtgtgtatgatgccgctgagtttcttgatgcgggcagttataagcatgtacaacgctgggcgaaagaagtaggcgaacgtccggcggtgaaacgtgggcgtattgttaaccgcaccaacggaccgctgaatgagcagttgcatgagcgccatgacgccagtgatttcgagacgaatacggaagataagcgtcaggggtaagggttggtgttcgtcgcagcaagccatccaggccggataaggcgttcacgccgcatccggcaatcgtgcacaatgcctgatgcgacgctgccgcgtcttatcaggcctacgaaagctaatcatcacgcgctggtaatgtcgtaatccatttggcgcagtgcgtctaatgtggctttggcttcatcttcgtcgatgatgctcatggcaaatccgacgtgtaccagcacccactggcccagtagatcggcagggttaccttcacaaatcagggcgatattcacatcgcgcttgataccacatacttcaacctgcgcaagctggtgaatatcttcaccgacagccagcacctggcctggaacgccaatacacattattaactccggttattcaacttcaatacttttgacgatcaggctatcgccggtatcgacacgcaaccgctcgccgtgacagagcggacactgcgcatcgtgctgatgaatctccaccacctggctgcaatcccagcaccaagcctgggcgggtttatagacgatatgtaaatcgcacccttgcgccaccgttccgtggcagacaatttcaaaactaaaacggacggcgctctcctcaacgcaggagagcgcgccaatttccagccacacggcggtgacgcgcttaacatcgtgctgctccgcctgccgttggataatttcaacggcgctctggcaaagagacaactcatgcattttcgccactcctgcgaccaaacagcagggcgcgacgccctgcgtgtggtacatccggattcgtgactggcaggctaaggatcattcgtgcgcagtcatccgtcaggcgttggccctcttcaatgctcatgctgtggctaagcgggctcatcaggctacaggagagatattggctaacaccgtccagttcgccaacggtaaaggtcatagtgccatacggcagttgcagaccaattttttcactcactttgcgcagcggccagagttgatccgggccggggaagataactgcactcagcatccacggggtgatcacacaccccgtccactgaccttcgaacagcgtaaaatcagaaacatacaccggcatactaggatgcagaaaagagagatcgtgcatgctacgccgggcaatttcttcaaacactgcctgtacttgcgccttcggggaggtctggaaacctgctatctcttcagtcatgaatcgcctcccgtgggatggcttccacgccagattcacgcagcgcagccagaacctgctcaagcgcaggttcaatcattgcttcaaccgtcggcgttaagccgatgtgtggctccaggctttccgggatcacgccgaccagggtcagctttttcggaaactcgccggtgaagcgcagggcgctcaagacgtcggccaggccaagctgatgcggagagattttgttggtaaacaacgccggaacttcttcatcccgcaggatcatcatcgttcccggcgcgttctttttgctgacaatggcatccgcaataatcaaatgatcgcgatttgccatgtcgccaagcagctccattcccgccgtgccgccatcgaggatctcaacataatccggcagaatgtatcgttgctctaacgcttcgacaatccgcacaccgatggcttcatcggtcagcaaaatattgccgacccctaagactaaaatacgcattacagaaccttcacactaaccacttcgttgccgtcagcatccactacgtgtaccgcacaggccatgcacgggtcaaaggagtgaatggtacgcaccacttccagcggtttattcggatcggcaaccggtgtacccaccaggctctgctcgtaaggaccgacgtcatcattgaagttacgcggaccagagttccaggtacttggaacaaccgcctggtagttgctgatgataccgtctttaataaccatccagtgagagagcataccgcgcggcgcttcgaggaagccaacacctttgaattcacccgttgccggaatgttcggcttcacaaaggtggtgtgatcgcctttgccgatattggtgatcagtgcactgtattggttttgcaggatatcctgcaattcacagcagtgaacggtacgaccaataatacggcccagcgtggagtgcagctgtgccacttccagcgtgttgccagtcagtttctgataaatcgcaacgatttcattcagtttgttctgggtagattcgcgacctgccgccagtttcaccagcatattagccagtggccccacttctaccgttttgccgtagaaagtcggacttttcacccaggaatatttcccgtcgtcagaccaaccatcataagccggaatggtggtgccttcccacggtgcctgcggcgcttcgtctttataccaggagtgcttcgcgctttcctgaatgcctttgatcaggtattcatcggaatgagaagtgatcggacgatagctggacagatccgcattctcaatgtagccgcccgggaacaggaagctgccgtttttactgtcggtcgggaattccggcacgctcaggtagttcaccgcacctttaccgcgtgtcagccattccgggtagaacgcggcaataactgcggtatcaaccttataaacctgctcaacaaagtcgctcagtttgtcgatgaaagacttgatgtacatcaggcgctcaaggttcagcacgcccaaaccgtcgaggttgatcgggttcgcgacaccacctaccgccaggttctgaatgtgcggcgttttaccgcccagcagcgccacgacgcggttagcgtcacgctggcactccaacgcttgcaggtagtgcgctaccgcaatcaggttcacttccggcggcagtttcatcgccggatgaccccagtagccattagcgaaaatacccaactgaccgctggcaaccagatctttgatcttgttctgaactttggtgaactcttccggactgttcaggtgccaggtgctaacgcctttcagcatttcggaggctttggttgggtcagcttgcagtgcagaagtgatgtccacccagtccagcgcgctaagctgatagaaatgaacaatatggtcatgcgtggtgtgcgcagccagaatgatgttacggatgtattgcgcgttaaccggaacgtcgatattcagcgcactttctgccgcacgaacggaagacagcgcgtgagtggtagtacatacgccacagatacgttgcacaatcatccatgcatcgcgcggatcgcggtttttcacgatctcttccatgccgcgccacatggtaccggaagcccatgctttgctaacgacgccattttcgatttcgcaatcgatgcgtaaatgcccctcaatacgggttaccggatcaatagtaattctctggctcatgctttgctcgcctcatgacgattatgatcgttttgttttaaaggaggaagtatcggcagtagacgaatgagtacgatgtaagcgcaaatctcaatagccacaaaaccaatagaaatcaacagttcttcccaggtcgggaagtaggcgtaaccgccgcccgggttgaatgccaccaggctataggtcagacgccaggttgcacaacctaacagtgcgctcagtgcactcaggaacagcatgcgggaatcattacgcagcttcgccacacgcagaacgaccagcgggaagagcatcagcaggacttcaatccagaacatcacggagtagaagtcaccggcaaacgctaagctcagcttgtcgcgatagataagctcgccaaagcgcagcacgatgaaaatcgccagcaacacactgatggtgttggtcagcttaacaaacagactcttttcatccggaccgttgccacgcagacccgcctgcaccaggctaccttcaaagatgacaatgctgaagcccatgatgaacgccgtcagcaggctgaacagcggcaacatttcatagctctgccacaacggatgcaccttgtagcccgcgctgatcatcaggctccccatactagactggtgcatggtcggcagcagcgcaccgagcgcgatgatgaagaacatcaccttgtttagtcgctgtaggctcaccttccaccccagacgttcaaacagtgccggagcaaactccagtgccatcacgccgatatagatggtcatacagaccgccgtctcgaacagtacgctgttcacgttgaagtgacccggaatgtagaagtacggcaggttccagtagcgacccacgtcgatagtgatgctcaagccacccagactgtaaccaaacagactcgccaacagcgccggacgcaccagcggatggtattgcccacggttaaagacgtataccgcccacgccagcgcccagccgccacaggcaaagccggtgccaatcagcaggtcaaacgcgatccacacgccccacgggaagccgccgttcaggtcagagacagagcccagaccgaacaccagacgcttcacaatcaggagcatacagatgacgattaacggtccaaaaatcatgaccggtttactgatgattttgccgcccagcggttgtggatcatgactcatgatcgtctcctccgtcgtgattattcaactctcatgatcgtctcctccgtcgtgatggtcgtttttggtgttgcgacgaaccagcacggttaagcccgccagcacagccagtggtagcatcatgcctttatacagggtgtgttgaatattttcggaacgcgcaccggtagaaagatcgtccagtttcggcaggtcgagattttcataaggcacacccgtcagtaccagaacctgagtaccgccgccctctttctcgccgtacagatgcggataatatttcggcaccgtatgcaggtaagtgtcgccagatttcagcgtctgacgcggatagtggtattcgctgccaggcttcagcgccagacgttttttcgcctccgccatcagctcttcacgcgtaccgaaaatcaccgcgcccgccgggcacacttctacgcagccaggtagaccgcctttatcgagacgttccacacctttctggttgcacagctcgcacttatgcagcgcaccaaacgggttgttgtagtcgtacttcggcacgttgtacggacaggcgaccatgcagtaacggcagccggtgcacacatctttgtcgtaatggacaatgccggttttcggatcttttttcagtgcagagaccgggcacacagagacacagttcggatcgacgcagtgcatacactgtttcttaatgtacgcgtagccgttctcctcctggtctttgttgacccctgtgccgctggtccacacctgaatgatgttattggtatacgggctcagtttgtcgttgttgctccaggtctgttccccttgcgggttacgttcagggaaattgatatcctgacacttggtgacgcaagcctggcagcctacgcacaaggtgctgtcgtacaacatccccaggcttcccggaattggcgggcggttttcagcagccgcatgactgacagacggcagcgcgcccgtcagcaatgccccgcaggaggctgctttaataaaattacgtctgttcacggttattctccccgactgtcagcgttatctttcttttgctgacgacccagttcacgcaccgccatcacgctgacaccggcaaccaacccaaccacaccgccgagcaaaccaatagcgcctgcagagacgttgccgccctctttagcgttaacatccggtttctgactacgcggagtttgattttcgacgttggcaagctgatggatgcctttatggaagccgataccttcttcgttacagccatagcaagggtgaccaatcgccaccggccacacaccgccaacatcgcagaattgcagcgtactgcagttgccgtaagtttctggccctttacagccgaggtggtacaggcaccagccttcgcggtggccttcatcaccgaactctttggcaaaacgaccagcatcgaagtgcgggcgacgttcgcagtgttcgtgaatcagacggccataggcgaaggtcggacggtttttgtcatccagtttcggcggtttgccgtaagtgatgatgtgcgcaacggtcgcgaggaagttgtgcgggttcggcgggcagcccggaatattgataacggttttgcctggcagaacttcttgcaggctgactgcgccagttgggttaactccagctgcggcaacaccgccccacgcagagcaggaaccgatagcgataatggctgctgcgccttccgccgctttgcggatgtgatccacaatcggctcaccggcaaccatgcaataaataccgttatcttttaatgggatggaaccatccaccactaacacatactgccctttgtacttctcgagagcgttatgtttgttctcttcgacctgatgaccgaaggcggcggaaagcacttcgtgatactccagagagatagtctccagtacgaggttttctaccgttggatgcgttgcacgaagcagagattccgtacaaccggtgcactcctgcgcgccaatccagataactggcggacgctgcgggttagtaacgctttcggccatctctgcagcggctttgctacttaaccccatggtggcggctaatgctgcacaaagcttcatgaaatcacgacggttaatgccgtgagaatggatgagggtgttatctccagtcatttatagttattccgttgcgaagacctggcatatattttgcctcaatcgcaaaatcaataatgcgatcgatgcgccatttaccacacatttattatggttatcgatatcatgatactgcggcggggcgctaaaacgaagggaagaagcattagtgtaattaattaaagcaagataatacgtatgtttgatcaattttcgaggcgataaccggccataaaaaagcgcaacgtagaacaggaattattctcacgaaagaaatccattaccatctctttatccagtccatagcggcgcgtcagaatacccgcttcccaggcgctaagctggcgatctccggtcttttcgtacatccggtgactgtagcctaatacaaaaccgcgtttataatcggcacagaattttgtcacattaaccgcactgtcggcatgcgttgcttttaatcccgccattaagcctttaccaaaatggttattcatcgttcacctcattcgctatatattgtcatatatagcgatattttaggcaaagaacgacttttgcgcacgctattttttcatgcttgtttaagacgtaatcccgtaagagataaacctatcaggagagatatttatcgaaccatttcagtgtcctttgccaggcaagatcggcggcagatttgtcataacggggcgtggaatcattatggaatccgtgattaacccccggatagatatacgcctcataaaccttattattggctttcaacgccgcctcgtaagcaggccagccctcgttgattcgggtgtccagttccgcgaagtggagtagtaaaggcgcttcaatcttcgccacatcggcagtgggtgcctgacgaccataaaacggcaccgcgcaggccagttccggatacgcgacagccgccgcgttgcttacgccaccgccatagcaaaatccggtaatacccactttgcctgtcgcttgcggatagcgttgcataaactcaattgcggcaaagaaatcattcatcagtttgttggatcaacctgctgttgcagctcacgacctttatcatcatttcccggataacctccaacggaacttaagccgtcaggtgccagggcgatataccccgccttcgccactcgccgtgccacatcttcgatatacggattcagtccacgattctcatgcaccaccactacggctggcgttttgccgctcatctttgcgggcttcaccagataaccccgcacctcgccgtgaccatttgggctaggatacgtgatgtactcagcaacaatttccgggtcggtaaactctacctgagtcgccagcgcataatttggcttgagcaaatcaaacaacgctaatgccgtcatcccgcctaccgcacttcgccgcaaggttgaggaactcacgtttcgagattttcccgtgagcgtaatagtcatagtaatccagcaactcttgtgggaaatctttggcggttaaacgcggcatcgttgcactcctcagttggtgtttttttaagcaaagcataagcacgtatttttgcccagtttttcgtcactctgtgagccagactacgggatacgcgctggcgaatcgctaaactagaaacattgtttcgaaattgaacggtggaaaggagaggtcatggtctggttagcgaatcccgaacgttacgggcagatgcaataccgctattgcggaaaaagtggtttacgcctgcccgcgttaagcctcggtttatggcacaatttcggtcacgttaacgcgctggaaagtcagcgtgcgatcctgcgtaaagcgtttgatttgggcattacgcactttgatttagccaacaattacgggccgcctccaggaagcgcagaagagaactttggtcgcctgctgcgggaggattttgccgcttatcgcgatgaactgattatctctaccaaggctggctacgatatgtggcccggcccttacggctctggcggtagtcgtaaatacctgctcgccagcctcgaccaaagcctgaagcgtatggggcttgagtatgtcgatatcttttactctcatcgcgtcgatgaaaatacgccgatggaagaaaccgcctctgcgctggctcatgcggtacaaagcggtaaggcgctgtatgtcgggatctcctcttacagcccagagcggacgcaaaaaatggtcgagttgctgcgcgagtggaaaattccgctgttaattcatcaacctagctacaatttactgaaccgctgggtggataaaagcggcctgctggataccctgcaaaataacggcgtgggctgtattgcctttactcctctggctcagggattgctgaccggaaaatatctcaacggcattccgcaagatagtcggatgcatcgtgaagggaataaagttcgtggtctgacaccgaaaatgcttaccgaagccaacctcaacagcctgcgcttattgaatgaaatggcacagcagcgtggacaaagtatggcgcaaatggcgttaagctggttgctgaaagatgatcgcgtgacgagcgtattgattggtgccagccgcgcggagcaactagaggagaacgtgcaggcgctgaataatctgacatttagcaccaaggagctggcgcagattgatcagcatatcgccgatggcgagctgaatctgtggcaggcgtcttccgataaatgacctgttaataacgggcgcgcgaaccgcgcccgaatcagatcagtgattatgacgagtcagtcggtcaagatagcccatcacaaatgcagaaagcacaaacgtcagatggataatgacgtaccacatcagtttgttatccgggacatttttcgcatccataaagacgcgcagtaagtgaatggaagaaattgccacaatgctcgctgctactttgtttttcaggctcgttgcgtccattttccccagccagttcagcttctctttgttctcggagatatccagctgactgacgaaattctcataaccggaaaacatcaccatcaccagcaaaccgccaaccagcgtcatatccaccaggctcagcaacacgaggatcaaatcactttccgccatgctgaagatattcggcagtacgtgaataatctcctggaagaacttcagcgccagggcaactaacgccaggctaaggccaaagtacacgggggcaagcagccagcgagaagcatacattgcattttcaagaaaacgttccatacattcctgtcgtgtagttaaaacgggcaacagtatatcgcaattgagtaaacagcacgcaacagcaaatcaacatatacgttaaacctttgtcgcataattctgaggtttagggatcttcctggttcccttatcaacgcatcgagaacgtctacccttaaaggacgttgaacctgaagggagaaaaacgatgtctcatttaaaagacccgaccacgcagtattacactggtgaatatcccaaacagaaacaaccgacgccaggcatccaggcgaagatgacaccggtaccggattgcggcgagaaaacctatgttggtagcggtcgcctgaaagatcgtaaagcactggtgacagggggcgattccggaataggtcgcgctgccgccatcgcttacgcgcgtgaaggggctgacgtggcgatcagttatcttcccgtggaagaagaagacgctcaggatgtgaaaaagatcattgaagaatgcggacgcaaagccgttctgctgccaggcgatttaagcgatgagaaatttgcccgtagcctggttcacgaagcgcacaaggcgttaggcgggctggatattatggcgctggtcgccgggaaacaggttgccattccggatattgcagacctcaccagcgaacagtttcaaaagacctttgccattaacgttttcgcgctgttctggctaacccaggaagcgatccccctgctaccgaaaggtgcaagtatcatcaccactagcagtatccaggcataccagccaagtccgcatttactggactatgcggctacgaaggcggcgattctgaactacagccgtggcttggcaaaacaggtcgcggagaaaggtattcgggtgaatattgtcgcgccaggcccgatctggacagcactgcaaatttccggcggacaaacgcaggataagatcccgcagtttggtcagcaaacgccgatgaaacgtgcggggcaaccggcggaactggcccctgtatatgtttatctggcaagtcaggagagcagctacgtcaccgcagaagtgcacggcgtgtgcggcggcgagcatttaggttaaaaaaatgcccggttgtgaaaagcaaccgggcatcattgtgaattcactcttacctgatgtggcgaaaacgccttatccgcctacaaacgcatgaagattcaacatgttgcaatagattttgtaggcctgataagcgtagcgcatcaggcattgagcacctaatgccggatgcgtcgtgaacgccttatccggcctacaaacgcacgaagattcaacatgttgcaatagattttgtaggcctgatgagcgtagcgcatcaggcaattctactttacttcgctttggcggtttcttcgccgaccagacctatcttcaggtaacccgcctgatgcagcgtatccattaccttcatcaacgtctcgtaatcgacggttttgtccgctcggaagaagatggtggtgtctttcttgccttcggttaacgcattcaacgccgtaatcattgtttcatcggtgaccggatcgttaccgataaacatgctgttgtctgccttcacgctcagataaaccggtttttccgggcgcggctgcggcgtgctggtagaagcaggcaagttcaccttcacatctaccgtcgctaacggtgccgccaccataaagataatcagcagaaccaacatcacgtcgataaacggcgtcacgttgatatcatgcatttcgccgttatcgtcgaggttttcgttaagatgcattgccatcggatattatcctgcgcgtaatttttgtgcgacacgaaccggatgcgcagcggcgctggcttccagatccaggtcacggctttgcagcaacaatacctgcgctgcaacatcacccagcatcgctttaaagccgccaatctggcgtgcaaatacgttatagataacgaccgcaggaatcgctgccacgaggccgattgccgttgctaacagagcttctgcgatacccggcgcaacgactgccaggttagtggtctgcgtttgcgcgataccaataaagctgttcatgatgccccagaccgtaccaaacagaccaacgaacggagaaatcgcgccgatggttgccagatagccgttaccgcggcccatttgacgacccactgcggcgacccgacgctccagacggaagctggtacgttctttaataccttcgttatcgtcgctgccttcactcagttccagctcattctgcgcttcattgagcaaatgcaggcttaagcttttgctaccaaaatcagcggcgatatcgttggcctggtttaaggaacgcgcttcagccagcagttgctgctcgcgcttaaggcgacgcttctgattgaagaactctacgctcttactgaagaagattgcccaggtgactacggaggccaaaataagcccaatcatcacgcacttaacgacaatatcggcgtgctgatacataccccagacggaaaggtccgtctgcattaaattattacccactgtgtatctccaggacgcaagtcacaaaatctgcgcataataatatcaaaacgacgtcgaattgatagtcgttctcattactatttgcatactgccgtacctttgctttcttttccttgcgtttacgcagtaaaaaagtcaccagcacgccatttgcgaaaattttctgctttatgccaattcttcaggatgcgcccgcgaatattcatgctagtttagacatccagacgtataaaaacaggaatcccgacatggcggacaaaaagcttgatactcaactggtgaatgcaggacgcagcaaaaaatacactctcggcgcggtaaatagcgtgattcagcgcgcttctagcctggtctttgacagtgtagaagccaaaaaacacgcgacacgtaatcgcgccaatggagagttgttctatggacggcgcggaacgttaacccatttctccttacaacaagcgatgtgtgaactggaaggtggcgcaggctgcgtgctatttccctgcggggcggcagcggttgctaattccattcttgcttttatcgaacagggcgatcatgtgttgatgaccaacaccgcctatgaaccgagtcaggatttctgtagcaaaatcctcagcaaactgggcgtaacgacaagttggtttgatccgctgattggtgccgatatcgttaagcatctgcagccaaacactaaaatcgtgtttctggaaagcccaggctccatcaccatggaagtccacgacgttccggcgattgttgccgccgtacgcagtgtggtgccggatgccatcattatgatcgacaacacctgggcagccggtgtgctgtttaaggcgctggattttggcatcgatgtttctattcaagccgccaccaaatatctggttgggcatagtgatgcgatgattggcactgccgtgtgcaatgcccgttgctgggagcagctacgggaaaatgcctatctgatgggccagatggtcgatgccgataccgcctatataaccagccgtggcctgcgcacattaggtgtgcgtttgcgtcaacatcatgaaagcagtctgaaagtggctgaatggctggcagaacatccgcaagttgcgcgagttaaccaccctgctctgcctggcagtaaaggtcacgaattctggaaacgagactttacaggcagcagcgggctattttcctttgtgcttaagaaaaaactcaataatgaagagctggcgaactatctggataacttcagtttattcagcatggcctacagctggggcgggtatgaaagcttgatcctggcaaatcaaccagaacatatcgccgccattcgcccacaaggcgagatcgattttagcgggaccttgattcgcctgcatattggtctggaagatgtcgacgatctgattgccgatctggacgccggttttgcgcgaattgtataacattgccacttttggacaattttgcagacattttattgtgaaaagtcttaaattgttgcgtccgggatcaaggcgtcccggacgattcaggagtacaataggcagataaaggcttaaacgctgttccacaggaaagtccatggctgttattcaagatatcatcgctgcgctctggcaacacgactttgccgcgctggcggatcctcatattgttagcgttgtttactttgtcatgtttgccacgctgtttttagaaaacggcctgctgcccgccagttttttgccaggcgacagcttgttgatactggcaggcgcattgattgcccagggggttatggattttctgcctacgattgcgattctgaccgccgcagcaagtctgggctgctggctaagttatattcaggggcgctggttagggaataccaaaacggtgaaaggctggctggcacagcttcctgctaaatatcaccagcgcgccacctgcatgtttgaccgccacggtctgctggcgctgctggctggacgttttcttgcatttgtccgtacgctgctgccaaccatggcgggaatttccggtctgccaaaccgccgcttccagtttttcaactggttaagtggattgctgtgggtcagcgtggtaaccagttttggctatgccttaagtatgattccgttcgttaaacgccatgaagatcaggtaatgacgttcctgatgatcctgccaattgccttgttaaccgctggcttgttaggcacgctgtttgtggtgattaaaaaaaaatactgtaacgcctgacgattttccccgttcccggttgctgtaccgggaacgtatttaattcccctgcatcgcccgcattcttgccgcatcttcccccggcgtcacaccgaagtaacgtttaaactcacggctaaattggcttgcgctttcatagccgacgcgcatcgctgctgcgctggccttcatgccgtcatggatgatcatcatccgcgccttatgcagacggtaattcttcaaatactgcaacgggctggtactggtgacagacttaaaattatggtggaacgcgcttacgctcatgttggcttctgccgccagttgctcgacgctcaggttttcggtgtatttattctcaatccgtttcagcacgcggctaatcagactgaagtgagtctggcgactgaccagcgccagtaacgcgccgccgcaaggtccggtcagcacgtagtacagaatttcgcggatgatctgtttgccgagaatacgcgcatccagtggtcgctccatcacgtcgagtaaccgctccgccgcgcataaaatctcttcacttaacgtggcggagttaatcccgctggctgccatgctcggctggaaatgctcatcttcgccaatgtccatcaacagttcctgtaactgcaaaatatcgacattgagacgcaaccctgccagcggcacctcactcgtggcataggtttcgcactcaaacggcaacggcaccgtcagcagcaggtattcattggcatcataacgaaacacgcgttcattgatataaccgattttatgcccggaaaagagaattatgatgccaggctcgtacatcaccggtgtacgtgcgaaaggcgtctcgccatacaacaaacgcacatcgggcaacagtccactcaaactattttctttatttttcagtttattaactttatccgccagcaagcggcaaatctcttcacgtttcatatcgcgtaatttcttaggaataatgcggcaattactttgtgcgcaattttgtagcatttctccagcactctggagaaataggcaagacattggcagaaatgagcattgagagccagggcgctggcgatcacaatgaaaaacatcaggcagatcgttctctgccctcatattggcccagcaaagggagcaagtaatgaacaactttaatctgcacaccccaacccgcattctgtttggtaaaggcgcaatcgctggtttacgcgaacaaattcctcacgatgctcgcgtattgattacctacggcggcggcagcgtgaaaaaaaccggcgttctcgatcaagttctggatgccctgaaaggcatggacgtgctggaatttggcggtattgagccaaacccggcttatgaaacgctgatgaacgccgtgaaactggttcgcgaacagaaagtgactttcctgctggcggttggcggcggttctgtactggacggcaccaaatttatcgccgcagcggctaactatccggaaaatatcgatccgtggcacattctgcaaacgggcggtaaagagattaaaagcgccatcccgatgggctgtgtgctgacgctgccagcaaccggtagtgaatccaacgcaggcgcggtgatctcccgtaaaaccacaggcgacaagcaggcgttccattctgcccatgttcagccggtatttgccgtgctcgatccggtttatacctacaccctgccgccgcgtcaggtggctaacggcgtagtggacgcctttgtacacaccgtggaacagtatgttaccaaaccggttgatgccaaaattcaggaccgtttcgcagaaggcattttgctgacgctaatcgaagatggtccgaaagccctgaaagagccagaaaactacgatgtgcgcgccaacgtcatgtgggcggcgactcaggcgctgaacggtttgattggcgctggcgtaccgcaggactgggcaacgcatatgctgggccacgaactgactgcgatgcacggtctggatcacgcgcaaacactggctatcgtcctgcctgcactgtggaatgaaaaacgcgataccaagcgcgctaagctgctgcaatatgctgaacgcgtctggaacatcactgaaggttccgatgatgagcgtattgacgccgcgattgccgcaacccgcaatttctttgagcaattaggcgtgccgacccacctctccgactacggtctggacggcagctccatcccggctttgctgaaaaaactggaagagcacggcatgacccaactgggcgaaaatcatgacattacgttggatgtcagccgccgtatatacgaagccgcccgctaagctttttacgcctcaaactttcgttttcgggcatttcgtccagacttaagttcacaacacctcaccggagcctgctccggtgagttcatataaaggaggaacgtatggctaatccaaccgttattaagctacaggatggcaatgtcatgccccagctgggactgggcgtctggcaagcaagtaatgaggaagtaatcaccgccattcaaaaagcgttagaagtgggttatcgcagcattgataccgccgcggcctacaagaacgaagaaggtgtcggcaaagccctgaaaaatgccagtgtcaacagagaagaactgttcatcaccactaagctgtggaacgacgaccacaagcgcccccgcgaagccctgctcgacagcctgaaaaaactccagcttgattatatcgacctctacttaatgcactggcccgttcccgctatcgaccattatgtcgaagcatggaaaggcatgatcgaattgcaaaaagagggattaatcaaaagcatcggcgtgtgcaacttccagatccatcacctgcaacgcctgattgatgaaactggcgtgacgcctgtgataaaccagatcgaacttcatccgctgatgcaacaacgccagctacacgcctggaacgcgacacacaaaatccagaccgaatcctggagcccattagcgcaaggagggaaaggcgttttcgatcagaaagtcattcgcgatctggcagataaatacggcaaaaccccggcgcagattgttatccgctggcatctggatagcggcctggtggtgatcccgaaaagcgtcacacctagtcgtattgccgaaaactttgatgtctgggatttccgtctcgacaaagacgaactcggcgaaattgcaaaactcgatcagggcaagcgtctcggtcccgatcctgaccagttcggcggctaacatgcaaattctcccggtggcggtaatgttccgctaccggacttttcagaaatcatttattcccctcgcgtcccgcccgttgttactcttccttgttcaggaatgccaaatataaggacatcatcatgcagagccggaagctcttaaaagaacaactcatctatatccgggataaacgcaacggagaggtgaaaaacagatgaaaataatacttctgtttttagcagccctggcaagttttaccgtacacgcacagccccccagtcagaccgtagaacaaacagtccggcatatttatcagaactataaaagtgatgccactgccccttattttggtgaaaccggagagcgggcgataacttctgcgcgtattcaacaggcgcttaccctgaacgacaatcttacgctgccgggcaatattggctggctggattatgatccggtttgtgattgtcaggattttggcgatctggtgctagaaagcgttgcgataacccaaactgacgccgatcatgccgatgccgttgtgcgctttcgtatctttaaagatgataaagaaaagaccacgcagacactgaaaatggtggcggaaaatggtcgttgggtcattgacgatattgtcagcaatcatggcagcgtcttacaagcagttaatagcgagaatgaaaaaacgctggccgctttagctagcttgcaaaaagaacagccggaagcctttgttgccgaactctttgaacatattgctgattatagctggccgtggacgtgggtggtttccgactcttaccgccaggcggttaatgccttctataaaaccaccttcaagacggccaataatcccgatgaagatatgcaaatagaacggcaatttatttacgacaatccgatctgttttggcgaagagagcctatttagtcgcgttgatgaaattcgagtcctggagaaaaccgccgattccgcccgcattcatgttcgttttacgctgaccaatggcaacaacgaagagcaagaactggttttacagcggcgcgaaggcaagtgggaaatcgctgattttatccgcccgaacagcggcagcctacttaagcagattgaggcaaaaactgccgccagattaaagcaatgagctgaattaaataacaattagccggaacaataaataaaagggaacactatatgaaaacgattttcaccgtgggagctgttgttctggcaacctgcttgctcagtggctgcgtcaatgagcaaaaggtcaatcagctggcgagcaatgtgcaaacattaaatgccaaaatcgcccggcttgagcaggatatgaaagcactacgcccacaaatctatgctgccaaatccgaagctaacagagccaatacgcgtcttgatgctcaggactattttgattgcctgcgctgcttgcgtatgtacgcagaatgataaaaaaatccccggtagcgtgtcagttgccggggatattttttaacgtccaaccgccgctttaggccgtttcttcgcaccagcattcaccggacgagattgcgtagagctcgctttttttgccgtagcaggcgtctgacgctgggtcgccatcggcgtatgtttcgtcaacgccggacgggtattgcggttctggcgacgagcttcacgcatctcttcaatggttggcgcaggcactaagcaatcgcgacggctgccaatcagatgctttttgcccatcgcttccagcgcctggcggattaacggccagtttgccggatcgtggtaacgcaacaacgctttatgcaaacgacgctgtttgtcgcccttcggtacgaagacgtcttcgctcttataaccaatcttcgccagcgggtttttcccggtgtaatacatggtggtactgttcgccagcgggctcggatagaagttctgcacctggtcgaggcggaagcggtgctttttcagccacagcgccagattcaccatatcttcatcacgcgtaccggggtgcgcggagatgaaataggggatcagatactgctctttacctgcctgtttactgtaagtatcgaacagctctttaaagcggtcatagctgcccatgcccggcttcatcatcttgcttaacggcccttcttcggtatgttccggggcaatcttcagataaccgccgacgtgatgggtcgccagttctttgatatagcgcggatcttctacggctatgtcataacgcacaccagaggcaatcaggatctttttaatgcctttcagatcacgcgcacggcgatagaggttgatcgttggttcgtggttcgtgtccatgtgcggacaaatatccggataaacgcagctcaaacggcgacaagtttgttcagcgcgtgggcttttgcagcgcaacatatacatgttggcagttggcccaccaagatcggaaatcacgcccgtaaaacctggaacggtgtcgcggatcgcttcgatctcattaatgatgctatcttcggaacggctctgaataatgcgcccttcgtgctcggtgatagaacagaaagagcagccgccaaagcagccacgcataatgttgacgctaaaacggatcatttcgtaagccggaatacgggcattgccataggccggatgtggcacgcgcttgtatggcagcgcaaaaacgctgtccatctcttcggtagaaagcggaatagcaggcgggttgatccacacatagcggtcgccgtgtttttgcatcaatgcgcgggcacagcctgggttggtttcgtggtgcagaatacggctagcatgggcgtacagcactttatcgcccttcactttctcgaaagaaggcagcaacacgtaggttttttcccacggtttcgggcgcggtggctgcacggttacggctttggcttcctgctttttcggtgccaccggtttgttatccgcgcacggcaaatcttcaccatacggatgcgggattgggtcgatttttccaggggtatcaagacgggtggaatccacgccgctccagccaggcagcgcctctttcacgataatcgcggtattacgcacatcgcggatttcactaattggctcgcccatcgccagacgatgcgccacttccaccagcggacgctcaccgttaccaaacatcagcatgtcggctttgctatccaccagcacggaacggcgcacggtatcggaccagtaatcataatgcgcggtacggcgcagactagcctcaataccgccgaggatcaccggtacatctttccacgcctctttacaacgctgggtataaaccagtgtggcgcgatccgggcgcttacccgcgacgttatccggcgtgtaggcatcgtcatgacgtaaacggcgatcggcggtataacggttgatcatgctatccatgttgccagcagtaacaccgaaaaacagattcggtttacccagacgcataaagtcgtctttgctgctccagtccggctgggcgatgatcccgacgcgaaagccctgcgcttccagcatacgaccgcaaatcgccatcccgaagcttgggtgatcgacatacgcgtcgccagtaaccaaaatgatgtcgcagctatcccagccaagttgatccatctcttcacgagacatcggcaaaaacggtgccggtccaaaacaggcggcccagtactgcggccaggagaacaggtcgcgatccggttggatcagggagatagagctcattttgcttccagaaatgataaaaaaataatcaaaggccggggattataagccggaacgaaagagaaatcgaaaggtattccatactcgccctcctcgggcgagtatgaagattacggtaccggattgaccaacagttgcccaatgctgccacggtccgccatttccagcgtctgactgttgaagtagaacgggaagtgcgcccaggaaggctgaccgaaataaacaagcagctccacttgtccgtcaacccaaacggtatctttccagcctctgtcttccgggaacggcatcgcgccattcacgttacggatctggaacattacgccttcaatatggaacgcttgcggctcgtccgcgcgtaccgtccagcgttcccacgttccttgctgcgcggtgacatcaatacggttgacgtcccacagctgtccattaatacccgggtcatcacccagactgatatcgcgactgcgaattgggctaccagccatgatttcagttggcagcaagcgcatcggaagactgtctgtgaccagcggcagaaggccggttgggcgcagcgttagcaccagggtagaaaccagaatactggatggctcaaagaagccacgaatacgatcaacaatgctcgccgcttcgccacaggtgatgctcacttcatcgccgttgctcatatccaccagaatctcgcggcgctcgcccggtgccaggctaagttgcttcacgcttacaggagcaggcaggaatccctgatcgccagaaatcacatgtaacgggcgaccatcgttcatctgtagttgatagcgacgagagttgctcgcgttcagcagtcgcaagcgcacccagccacggctgacttcaacgtacgggctttgtacaccgttaaccagcagcgtatcaccaacaaagccgccgcttcccggttcgttgtattctggcgtaccaaagttatccagccgtttatcctggataatgaccggaaaatcatccacaccataatggttggggataggcaggctcttgctgacttcatcttccaccagccacattccggcaaggccgttatagacctgctgagccgtgcggttgggagtattggcgtgataccacagagtagctgcgttctggcgaatgggcagtacgggtgcccagtcagcgtttgggctcatcatccgtgccggaccgcccatcagcgggcctggtacctgtagcccggccaccgtcatactgacattttctgtcaggcggttgctgtaaataagcttaacatcgtcgcccttccagacgcggatagtcggccccaggtaacgaccattgattccccagacgctcgcgcgtgtccctggcgtaaaactccagtgcgcacgttgtacagtcataaacagcggttgcccacggcgagattcaagtagcggcggaacgggtagcggttgctgttgcccggctgcgctggccttcaggggaacagcgcctgcacaaagtgcaatcccgcttgcctgaatgaactgacgccgactgagactcatatttgctccatgtaaaactggctaaagtaataccgtgcaggaaagtgttccccgcaaaaatacagattgccgacttaaacttttccggcggcttcgcgttctgcgacttctttatcgagctcggcgattttttgttccattatgctacgacaatgggcagccagctcacgaacctgatctttgccatactgactgacgtcaattggcggcagcatttcgacaatcaccagaccgttgtgcagtcgattaagattaatcttattgctagttgtagagacgcacacgggaataatcgggacgcccgccgcaattgccgcgtgaaatgctccagtcttgaacggtagcaggccgcgaccacggctgcgggttccttccgggaacatccagatggaaatacggcgttttttgaagtgattcactacttccgcaatggtgccgtgagctttagtgcgattgtttctgtcgatcaataagttgccggttaaccagtacaactgcccgaagaaggggatccacagcaagctctttttacctaccgtcaccgtcggcggttgcacgatgttgcttgctgtcaccatgtcatagttgttctggtggttagcgatatagatagcattgccgtagctttcagcgtctgtaggtttacggcactcaactttcaggccaaacagcggcgcaagacggccaaacatatgcccaaaggtggccacatgtttcgggttacgcgggctgaaaaggcagtaaatggagccgaatacacagactaagatgctgtaaatcacggtaataataagacgaaagatatatagcataacaccctctgaaggtctgagagactggcattgtacgtcacctgaaatcaggttagggcattgttaaaagccgctctctggaaaagcgtattgttaatcgcaacgcatgaataaacaacggtttcaagggaatttttatcgtttccgggggttgaatacgctgccggatgacgacttaacgtttcatccggcgttccttgcaagcgggaggaaacagcgccctccccggcatattactcttcgctatcaccgctgctggcacggcgaggagagtcgatctcaacacgatcgatacgctgcaaaccgcgcatcaacgtaccgcggcgtccacgttcgccagtgactttctgtaactcttccgggcgcagtttaattttgcgtttcccaacatgaatggtcagcgtgctttgcggcggcagaacgtacaattgcgccagaccatcttctccacgcgcggcttctgcgcttggaatgttgataatcttgttgcctttgcccttgctcagctgcggcagatcacttaccgggaacatcaacatacggcctgcctgagtgattgccagcagcatatcggaagcatcttcaatcaccaccggcggcataacatgggcattttccggtaaggtgatcaaagccttacctgcacggttacgcgccaccagatcgttaaaggtgcagacgaaaccgtaacccgcatcggaagccatcagcagtttctgatcgtcgctttccatcagcatatggtcaacggtcgccccaggcggcaacgttaatttgccggtgagcggctcgccctgaccacgcgcgctcggcagcgtaatcgggtcaatggcatagctacgaccggtggaatcaacaaacactaccggttggttgctcttacctttcaccgccgctttgaagctatcacccgctttataattcaggcccggcgcgtcgatatcatggcctttagcgctgcgtacccagcccatctggctcagcacaatggtgacaggttcagacggcagcatgtcgtgctcgctcatcgctttcgcttcttcgcgttcctgcaacgggctacgacgatcgtcaccgtaggcttgcgcgtctgcctgcagttctttcttcagcaggttattcattttacgctcggaagccaaaatgccctgcaactggtcgcgctctttttccagttcactctgctcaccgcgaatcttcatctcttccagtttggcaagatgacgcagtttcagttcgaggatcgcttccgcctgggtttccgtaaggccaaaccggctcatcagcgccggtttcggttcatcttcattacgaatgatctcaatcacttcgtcgatattgagaaacgccaccagcaaaccttcgaggatatgcaggcgcttgaggactttctccagacgatagttcagtcggcggcgcacggtatcgcggcggaacaccagccattcggagaggatttccagcaggtttttcaccgccggacgaccatccagaccgatcatattaaggttaatacgatagctcttttccagatcggtggtagcgaagaggtggttcatcacctgatccatatccacgcggttggaacgcggcacaatcaccaggcgggtcgggttctcgtggtcagattcatcgcgcagatcgtcaaccatcggcagctttttgttgcgcatttgcgcagcaatttgctccagtacgcgcgcaccactaacctgatgcggcaatgcgctgataaccaccgcgccatcttctttcttccacaccgcgcgcatacgcacactaccacgtccgttctcgtagattttacggatctcggcgcggctagtgataatttccgcttcagtcggataatccggcccctgcacgatatccagcagctgatcgagcgtggttttcggctggtcgattaatgcgattgccgcctgagccacttcacgcaggttatgcggtggaatatcggtcgccatgccgacggcaataccggtggtgccgttaagcaaaatgtttggcagacgggcaggtagcattttcggctcctgcaaagtgccgtcgaagtttggcacccagtcagccgtcccctgccccagctcgctcaatagcagctcggaatatttgctcaaccgggattcggtgtaacgcattgccgcgaagcttttcggatcgtccggcgcgccccagttcccctgaccatcaaccagcggataacggtaagagaacggttgcgccatcaggaccatcgcttcataacaggcgctatcgccgtgcggatggtatttacccagtacgtcaccgacggtacgggcgctttttttaaatttggcgctggcattcaggcccagttcagacatcgcatacacaatgcggcgctgaacaggtttcagaccatcaccaataaacggcaacgcacggtccatgatcacgtacatggagtagtttaagtaggcgttttccgtaaattcatgtagcgcaaggcgctctgccatatcgctcattaattctgattcctcaacttattcgccagccttcaaaggggcaatattgccggagatactacattatctgccgcgtcgagtcacaggagatcaacgtgaatagcgccgccggacgtgctccgacggcgataaaggcatcaatgtgccttgatatacaactctttgctgtagacataatcctggggattatgcagcggaaaaccgccaacgtagggtttaagcagtttgattaacggctgatagtagataggaatcagcggtgcctgttggttgatgatcacttctgcctgctgatacaacgcattacgctttgtcgcatcagtgatctgcgtggcctggtttagtaaggcgtcatactgcgcatttttccagtgaccgacgttttcttcactatcgcttttgagcgtgttcaggaagctggaagcatcattgtacgtcgcatcccagctctgccgagacagcatgaaatcaccggctcgtcgggcatcaagataggttttccactccattgtgcgcagcgtcacctgtgcacccagccattttttccattcggaagacaacgctatcgcggtcttttcatgcagatcgtacttgttgtagaacagctcaaagcgtagcggatgagaggcgtcgtatcccgcctgtttcagcaaggcttttgccatcgcgacgcgctcactcattggcttttgcagttcatcgaacgtcgtcgcgctaaagccttttacctctggcggcgtcagcgtggttgcgggcgttctcaaccccagtaccttttgcgcaataagctgtcgatcaaccgtaagatatagcgcccgacgcactcgcacatcgttaaatggcggtttctcaaggttgaagttgtaatattcgctgttcagacgcggaataattcgtagctcgccaggcagacttttttcaatggcgggaatttgctgcgccggaacccaggtgagatcgacctctcccgcgcgatagcggttatagccggtgacgctattatctagcgccagatactcaacctgttgcaatactgtatgttgcgcatcgcggtactttggatttttgcgtgcagtaatcttttcgttaactacccactgatcaagcacaaaggcaccgttgtaaaccatgttctctggcttactccagctatcgccatgtttagcgatgacatgatgaggaaccgggaacagcgtcggccaggcgagcatcgtcgtgaaccaaggaaccggctgctcaagcgtaacttcaagagtacgatcatccgtcgctttgacacccaggcttgtaacatctgctttacccgcaacaatagctgcggcattgttaatgtgcgcctgtgccagatagccagcaaaagggcttgccgttttcgggtcaaccgcgcgctgccagccgaggacaaaatcctctgccgtcagaggctgaccgtcggaccactgcaaaccgctacgcagatggaaaatatagcgcttgccgccgtccagtatctcccagcgttcagcctgagcgggctgcacctggccttcaccgtccatccataccagaccttcaaacagatccagcacaatctgcgcggcagtattctcctccaccttttgcgggtcgagcgtacctgggtcgctatgattgttgtaacgaaagacttgttgcggggcgagcggtgtgttggcgggaacgtcagcagcgtagagaggagccgcacttaccaggctgaccagccataataaatttcgcgtatacatggtattccttaccggagaaattataagcccaacaacaatacgcctgtggcattgttcgctcaaacttatcgcgagtgatttggctcacactccggtaaagaaaaaagcgagttgcccccgcttttccattaattaacggatttcattcaatagttctggatgcttatccagaacacgtaaaagtttgattgtggaaggatgaggttgggcattgcctttttcgtaacggctaaacgcatttacacctcccccaaaaatttcgcttgcctctttttgggtaagagagagcttttttcgaaccttcactataaattcaggtgccactgtttcggcattcacgctagcccgaaatgcctttacttgcgccatgaaagcatcactctcttctttattcatgatgctctcttcgcaatggacacaatataaaccgtggatacctttcaatactgtttttcgtccacggaaggtgtatggaatatctttaatgccagaaaccatttctccctggtggcaaaccggacatttcatattacttctccttaaagctgacgatcagtacgtcatgaattaccgtaattttaagataaacctggcctgtaacaagcctgggtctgtaaacatcctgccagatagtatgatcagagtaggtggtcatgcttttataaaagtcgctctcacttaatccaatgataacattacacataccatcaaaatccaaacctaactcatctgcatttaacagggcactacgtgttgtacgaacttgcccggcattgacaagttttttaacctgactcaaacgtgtatgtggtgtgcgtttttccataacccccgcctccctgttactttagttataacctaaaaggttaattacagcaatgaaaaagcacctaaaaggttagttagatgtacggagatagtgaccacacaaaacgtattctttaaggaaagtgattgaccatataagaaagtggcgcattagtagcgccagtttgaagcaggaatttataagggaagctggagtcaggcatcacgccaacggcacataaacatccgtttccagtcgctgctctgtcaccccttcggcaagattggtgtagtgaaacagaatcggtgctttacgcattttctcgccgcttgcaggcagccagtggcgaatgatgccccataccgtgtgactaatatcgtccagctcgccaacgtggcgggccacggcataacgtccaccggtaagttcaccattgctcacaccataacgattatcgggaatcggttcgctaacgctgccgcagatatcaaagcgaaacgcttccggtgcggtggtggcagggtcgtcccaggcgacgccaaaagtctggctttggttaacaggagaaagcccgtctctttacgccacatgataaatttcgccacgctgtagttgagcaattcagggctacagcggtgcggcaacatcgccacaggtatacttgggaaatcgataatgtttacatccagtgtcaggtttgtcattttgcctccctgcgaaattattcccgggaacgcgtcccgggagcggtaacaattacggatttactttgcggatctgtttgacgtcaatttcaacagaattccagtctttatcgacttcaccctgaatctcaaccgtatctttcggcgtcaccgtcacgccgttccagcgtttgtggtcgatatcaacattgatagtaccgctggcatctttgaacacgtagagatcgtcagagatgcgttcaacgatattgccgcgcagggttacccaggtgtcgtcacgcagggattttgcgctttctacagtcgttacgctgccgttcggcccctggaatcctccggcctgactttgcgttgcgcttgggccagaaaaaccgccctgctctgctgccatcaccggtgcgctgcacagggccattactgcgattactgctgcgaattttttcatgtttattactccctttaatgtctgtttccgagcatttaacaagatagtccttaacaacttcttaagggaaaaaaataaaatttagtgctgtacagagcgcgttacaacacggtttactggcagcaaatacggttatcgcagggatgaaaaaatgcgaattttactgatagaagatgacatgctgattggcgacggcatcaaaacgggccttagtaaaatgggttttagcgtcgactggtttacacaaggtcgtcagggaaaagaggcgctttatagcgcaccttatgatgcggtgatcctggatttaaccttaccaggcatggatggtcgcgatattttgcgcgaatggcgagaaaaaggtcagcgtgagccggtactgatcctgaccgcgcgcgatgcgctggcggaacgtgtagaagggctgcgtctgggagctgacgattatctgtgtaaaccttttgcgttgatagaagtcgccgccaggctggaagctctgatgcgccgaaccaacggccaggccagcaacgagctgcgccacggtaacgtcatgctcgaccccggcaaacgtatcgccacgctggctggcgaacccttaacactgaaaccaaaagaatttgccctgctggaattactgatgcgtaacgctggtcgggtactgagccgcaaactgattgaagagaaactgtatacctgggacgaagaggtcaccagtaatgccgttgaagtgcatgtgcatcatctgcgacgcaaactcggtagtgattttattcgtaccgtgcatggtattggttacacattaggtgagaaatgaaatttacccaacgtcttagtctgcgcgtcaggctgacgctaatctttttaattctggccagcgtgacctggctgctttccagctttgtcgcctggaaacaaacaacggataacgtcgatgaattgttcgacacccaactgatgctgtttgccaagcggttaagtacgctcgatctcaacgaaatcaacgcggcggatcgcatggcacagacgccaaatagattaaaacacggtcatgttgatgacgatgcgctgacctttgccatctttacccacgacggcagaatggtccttaatgatggcgataacggagaagatattccctatagctatcaacgggaaggttttgctgacgggcaactggtcggtgaagacgatccttggcgttttgtctggatgaccagtcctgatggcaaatatcgcatcgttgttggccaggaatgggaataccgtgaagacatggcgctggcgattgttgccgggcaattgatcccgtggctggtcgcactgccgattatgttaatcatcatgatggtactactgggtcgtgaactcgcgccgctgaacaaactggcgctggcactacgtatgcgtgaccctgacagcgaaaaaccactaaacgcgactggcgtacccagcgaagtgcggccactggttgagagcctaaatcaactgttcgcccgcacacatgcgatgatggttcgtgaacgacgctttacctccgacgcagctcacgaacttcgtagcccgttaacggcgctgaaagtgcaaaccgaagttgcgcagctctctgacgatgatccgcaggcgcggaaaaaagcactgctccaattacattccgggatcgatcgcgctactcgtctggttgatcaactgctcacgctaagccggctggacagtctggataaccttcaggacgtcgcggagatcccgcttgaagatctcctgcaaagcagcgtgatggatatttaccacacggcgcagcaggcgaaaattgacgtgcgactgacactcaatgcccacagcatcaaacgcaccgggcaaccgctattgctaagtttgttggtgcgaaatttgctggataacgccgtgcgctacagtccacagggcagcgtggtagacgtcacgctgaatgctgataatttcatcgtgagggataacggccccggtgtgacaccagaggcactggcgcgaattggcgaacgcttctatcgcccacccggacaaaccgctaccggcagcgggcttgggctaagcattgtccagcgaatcgccaaattgcatggcatgaatgttgaatttgggaatgcggaacaaggtggatttgaggcgaaggtaagctggtaacttctctgtctatgagagccgttaaaacgactctcatagattttattaatagcaaaatataaaccgtccccaaaaaagccaccaaccacaaaccagacaaataccgaggctgaatacatatacccaaaactcgaacatttcccgcataaagagttttcttaagataagaataataagtggcgtaagaagaaaaaatgctgcaatcattgcttgcaatatacgatcttcgccactaacggaaggtatactgcaaatatttcctccgctctcaagcatccagtcatacttattgaaagcaaaaaaagaatctattaaccaataagtaagcattatatatagcaatgcttcaaatattgttttaattttctgctttaacatatatcagtacgctcataaaaatccatttataattatcaacatgacacgttgatactttcatcttttacttattcaaagccatattttcaatccccaaaaaaaccgaaccaaacgtgtaaattattccggtgcgagtaagaattatgaggaatggctatcagtattgtcattttcagaaaatatttatcctgcatcggtgagtcagagtaagatcagacttttgctaaattcgcaaaagactttgcacattttgctaatttcaccgtaccgctctgtgacgtactatagtcggcaaacgtctcaccttgaggttaaaaaatgagcaacatcctgattatcaacggcgcgaaaaaattcgcccactccaatggtcaactgaacgacaccctgaccgaagtcgcggatggcacactgcgcgaccttgggcatgatgtccgcatcgttcgcgccgacagcgactacgatgtcaaagcggaagtacaaaactttctctgggctgatgtggtgatctggcagatgccaggctggtggatgggcgcgccgtggacagtgaaaaaatacattgatgatgtattcaccgaaggtcacgggacgctgtatgccagcgatggtcgtacccgcaaagatccgagcaaaaaatacggttccggcggcctggtacagggcaaaaaatatatgctttctctgacctggaacgcaccaatggaagccttcaccgaaaaagatcagttcttccacggcgttggcgttgacggtgtgtatctgccgttccataaagcaaaccaattcctcggtatggaaccgctgccgacatttatcgctaatgacgtgataaaaatgcctgatgttccccgctatactgaagaatatcgcaagcatcttgtggaaatttttggttaactagagctcaggctttagaaggagttaaccatgcttaccgtaatcgcagaaatccgtactcgtcctggtcaacatcaccgtcaggcggtattggatcagtttgctaaaatcgttccaaccgtactgaaagaagaaggttgccacggctatgcgccaatggtggattgcgcagctggcgtgagtttccagtctatggcaccggattctatcgtgatgattgagcagtgggaaagcatcgcgcatcttgaagcgcatctgcaaaccccgcacatgaaggcgtatagcgaagccgtaaaaggtgacgtgctggagatgaatatccgtattctgcagccagggatttaatcctgccttgtttgcccggccatcctgaccgggcaatgttctttcctttaaacctcaatctccgccatgtcgcctttctcttgcaaccagttgcggcgatcttcgctgcgtttcttcgccagcagcatatccatcatcgcgtcagtacgctgatcgtcttcatcatcgatagtcaactgcaccagacgacgagtgttcggatcaagcgtggtttcgcgcaattgcatcgggttcatttcccccagacctttaaaacgctggacgttcggcttgcctttcttgcgttttaattgctcaagtacgccctctttctcttcttccgtcagcgcgtaataaacctctttcccgagatcaatacggtagagcggtggcagtgcgacgtaaacgtgaccgtgtttcaccaacgcgcggaaatgttttacgaacaaagcgcagagcagcgtggcaatgtgcagaccatcagagtccgcatccgcgaggatacagattttgccataacgaagctggctcagatcgtcgctgtcaggatcgataccgatcgctacgctaatatcgtgcacttcctggctagccagcacttcgtcggaagagacttcccaggtgttaaggatcttacctttcagtggcatgatcgcctgatattcgcgatcgcgcgcctgcttggcagatccgcctgcggagtcaccttccacaaggaacagctcggtacggttaaggtcctgcgcggtacaatcagccagtttgccaagcaacgccgggccgctggtcagctttttacgcaccacttttttggccgcacgcatacggcgctgggcgctggaaatcgccatctccgccagcagttcagccgcctgaacgttctggttcagccacaggataaaggcatctttcaccacgccagaaacgaatgccgcgcattgacggctagagagacgctctttcgtctgcccggcaaactgcggatcctgcatttttacactcagcacataggcgcagcgatcccagatatcttccgcgctcagctttacaccgcgcggcagaatattgcggtattcacagaactcacgcatcgcgtccaacaggccctgacgcagaccattaacatgggtaccgccctgcatcgttgggataaggttgacgtagctttcggtcagcagttcaccgccttccggcagccacagtagcgcccagtccacagcttcagtatcaccagcgaaattaccgataaacggtttttccggcagcgtcggcagaccatttaccgcttccgccaggtaatcattcagaccgtcctgatagcaccagcgttgttcggtattgttgatctcatctttaaaagtgatctcaacgccagggcacaataccgctttggctttcagcacatgcgtcaggcgactaacagaaaatcgcgggctgtcaaagaaggtttcatccggccagaagtgcacactggtaccagtattgcgtttaccgcaagtgccgacaacctgtaaatcctgcaccttttcgccattttcaaaggcgatgttataaacctgaccatcgcggcgcacgttaacttctacgcgcttgctcagggcgttaaccacgctaatccccacgccatgcaggccgccagagaactggtaatttttgttagagaatttaccgcctgcatgcagacggcaaagaatcagttcaaccgccggtacaccctcttccgggtgaatatccaccggcatcccgcgcccatcgtcaataacttctaagctctggtcagcatgtaaaataacgtccacgcgttttgcgtgacccgccagtgcttcatccacactgttatcaatgacttcttgccccaaatggttagggcgagtggtatcggtatacatccccggacggcggcgaaccggctcaagcccggtgagtacctcaatggcatcagcgttataagtttgcgtcatggtttaagttagtaattcgagttgatcgtcagagatggtgcagaccaagaaaatcgacgatcgggttgaaataatcttcgaagcccgtgaatgcgtggttgccgccttctatgacagtctggcggcaggaagcgtagtacgccaccgcctggcggtaatccagcacttcatctcccgtctgttgcagcagccagatcaaatccggcgcttccagcgggtcaatctgcatgactttaagatcgtaaatatggcgactctctagcacatattgctgcccggtgtaggggttctcgttctgaccgagatagtccgtcagcagttcaaacgggcgcaccgccgggtttaccaccactgcgggcagcataaaacattgactcaaccaggtggcgtaatatccccccagactgctaccgacaatacccaggctatcaccgccatgttccaggacaatggattccagcagctctgccgcgtcggaaggatacggcggcaactgcggaatgatcatctcaacgtcagggtgatgttccgccagccagttttttaacaagctcgcttttgcagagcgcgggctgctgttgaaaccgtgtaaataaagaagcgtagacatcagtagccttcactagcggtatcaggttggaaacgtgtgtccgccaggcgatgcacctcggtggtcagcgtgccatcagcatgtaactcgagagtacgccagccgggcgcgatggtatccagcgtaaagttggaacagtgcggcttaaactgcacacaggtgctcggcgttgccagcaggcggcgaccattccagtcgagatccagctcctgatgaatatgaccgcacagcaagtatttgacgtgcggaaacttcgccagcacggtatccagttcgcccgcgttacgcagactgtgttgatcgagccaactacaacccgcaggtagcggatgatgatgcagcagcagcaacgtatggcgttctggcgcatcggccagtttacgttccagccactcaagctgaaactcgctcagctcaccgtgcggcacgccaaacacctggctatccagcaacaggatttgccattgctcaccaataaacacgcgcttcgccggggagatacccgcatcctgtaacgcgctgtacatcgcgggctggaaatcgtggttgcccggcagccagacgcagggcgcacgaaaacttgcgatgccttcagcgaaatgctgataggccgcagaggattgatcctgcgctaaatcacctgtcgcgacaatcaggtcgaattcgtgctggtgtggccgaatcgcctccagcaccgcctggtaactctcccaggtgtttacccctaacagggcttcgtgcttttgtgcaaacaggtgagtgtcggtaatttgtaaaatcctgactctggcctcaccagccagaggaagggttaacaggctttccaaatggtgtccttaggtttcacgacgttaataaaccggaatcgccatcgctccatgtgctaaacagtatcgcaaccagtccgctaaaaactgattaatttgatgcttttcgtcgcgttgatgcaactttttattaggataatcataccgcgctttgaagcgaaaaatctgctggctactacacacttcagccaccatcgcgtcatgatacagacgcaccgtcatactcggaaggctccagtaactgatcgcgggcgcagtctgttctattgtcaccagggtagtgtatcgggtgctttccacaatcgtcagccgatattgtgcgtttgccacctgatagcttacagtttcgccgggtgcgtcattgcgcggtaacaaacggcgcaattgactaaagttcatctcgcacaggcgcatcatttcaggaaagtcaggtgtgtaacgcttcatttatgcccactcattttttaacgcttgatgatgcagctgcagccattgcaaagcgatgacgctcgctgcgttgtcgattttcccctcttctacccactggtatgcctgttcccggcttaccacatgaacgcgaatatcttcgttttcatcagccagaccgtgaataccgcttgcggtcgtggcgtccacttcgcccaccataatactgctacgctcactggtgccccccgggcttgccaggaaacttaacaccggtttggtccgtttgactatcagtcccgcctcttcaatcgcttcgcgacgggcaacatcttccacactttcaccctcttcaatcatcccggcaaccatctccagtagccaaggggtttcgctggtgtcgtacgcggcaatccgaatctgctcaatcagcacaacttcatcacgcactgggtcaaagggtagcaagactgcggcgtgaccgcgctcaaaaatttcccgccgcacctcatgactcatttgcccgttgaatagacgatgacgaaatctataaagatctaaactaaaaaagccgcgataaagtgtttctcgtgcaataatttctacatcgtttttgccaaatgtaacgggcaggttgtctggcttaagcattgttaatgtcctggcactaatagtgaattaaatgtgaatttcagcgacgtttgactgccgtttgagcagtcatgtgttaaattgaggcacattaacgccctatggcacgtaacgccaaccttttgcggtagcggcttctgctagaatccgcaataattttacagtttgatcgcgctaaatactgcttcaccacaaggaatgcaaatgaagaaattgctccccattcttatcggcctgagcctttctgggttcagtagcttgagccaggccgagaacctgatgcaagtttatcagcaagcacgccttagtaacccggaattgcgtaagtctgccgccgatcgtgatgctgcctttgaaaaaattaatgaagcgcgcagtccattactgccacagctaggtttaggtgcagattacacctatagcaacggctaccgcgacgcgaacggcatcaactctaacgcgaccagtgcgtccttgcagttaactcaatccatttttgatatgagcaaatggcgtgcgttaacgctgcaggaaaaagcagcagggattcaggacgtcacgtatcagaccgatcagcaaaccttgatcctcaacaccgcgaccgcttatttcaacgtgttgaatgctattgacgttctttcctatacacaggcacaaaaagaagcgatctaccgtcaattagatcaaaccacccaacgttttaacgtgggcctggtagcgatcaccgacgtgcagaacgcccgcgcacagtacgataccgtgctggcgaacgaagtgaccgcacgtaataaccttgataacgcggtagagcagctgcgccagatcaccggtaactactatccggaactggctgcgctgaatgtcgaaaactttaaaaccgacaaaccacagccggttaacgcgctgctgaaagaagccgaaaaacgcaacctgagcctgttacaggcacgcttgagccaggacctggcgcgcgagcaaattcgccaggcgcaggatggtcacttaccgactctggatttaacggcttctaccgggatttctgacacctcttatagcggtagcaaaacccgtggtgccgctggtacccagtatgacgatagcaatatgggccagaacaaagttggcctgagcttcagcctgccgatttatcagggcggaatggttaacagccaggtgaaacaggcacagtacaactttgtcggtgccagcgagcaactggaaagtgcccatcgtagcgtcgtgcagaccgtgcgttcctccttcaacaacattaatgcatctatcagtagcattaacgcctacaaacaagccgtagtttccgctcaaagcagtttagacgcgatggaagcgggctacagcgtcggtacgcgtaccattgttgatgtgttggatgcgaccaccacgttgtacaacgccaagcaagagctggcgaatgcgcgttataactacctgattaatcagctgaatattaagagtgctctgggtacgttgaacgagcaggatctgctggcactgaacaatgcgctgagcaaaccggtttccactaatccggaaaacgttgcaccgcaaacgccggaacagaatgctattgctgatggttatgcgcctgatagcccggcaccagtcgttcagcaaacatccgcacgcactaccaccagtaacggtcataaccctttccgtaactgatgacgacgacggggcttcggccccgtctgaacgtaaggcaacgtaaagatacgggttatctgccgcattcttcccccttcagccttcaatttcgaccagccatcctctattctgatgggtatttaccactggtcccggaagacaaaaatgaaacggacaaaatccatacgccacgcatcgttccgcaaaaactggagcgcacgccatctgacaccagtcgctctcgcggttgccactgtttttatgctggctggctgtgaaaagagtgatgaaacagtgtctctctatcaaaatgctgacgactgtagtgctgcaaacccaggcaaaagcgccgaatgtaccaccgcgtacaacaatgcgctgaaagaagccgaacgtactgcgccgaaatacgccacccgtgaagactgtgttgctgaatttggtgaaggtcagtgccagcaggcaccagcccaggctggcatggcaccagaaaaccaggcgcaggcccagcaatccagcgggagtttctggatgccgctgatggccggttacatgatggggcgtctgatgggcggcggcgcgggatttgcacagcagccgctgttctccagcaaaaacccagccagtccggcttacggtaaatataccgacgcgacgggtaaaaactatggcgcagcccagccaggccgcaccatgaccgtaccgaagacggcaatggcaccaaaaccggcgaccaccactaccgttacccgtggcggttttggtgaatctgttgccaaacaaagcactatgcagcgtagtgcaaccggtacctcttctcgtagtatgggtggctgataccgatggaaagagtcagtattaccgagcgcccggactggcgtgagaaagcccacgaatacggtttcaattttcacaccatgtacggcgagccgtactggtgtgaagatgcttactacaagttgaccctcgcccaggttgaaaagctggaagaagtcaccgccgaactgcaccagatgtgcctgaaagtggtggaaaaagtgatcgccagcgatgagctgatgaccaaattccgcattccaaaacacacctggagttttgtgcgccagagttggctgacgcaccagccaagcctttatagccgtcttgatctggcgtgggatggcactggtgaacctaaacttctggaaaataacgccgatacgccaacgagtctatacgaggcggcgttctttcagtggatctggctggaagatcagcttaacgccggtaacttgccggagggcagcgaccagtttaacagtctgcaagaaaaactgatcgatcgcttcgttgagctgcgtgaacagtatggcttccagttgctgcatctcacctgctgtcgcgacacggtggaagatcgcggaaccattcagtatttgcaggactgcgcaacggaagctgaaattgctactgagttcctctacatcgatgatatcgggttaggtgaaaaaggtcagttcacggatttacaggatcaggtaatttccaacctgttcaaactgtatccgtgggaatttatgttgcgtgagatgttcagtaccaagctggaggatgcaggcgtacgctggctggaaccggcgtggaagagcattatctccaacaaggcacttctaccgctactgtgggagatgttcccgaatcacccgaacctgctgcccgcttattttgcggaagatgatcatccgcaaatggaaaaatatgtggttaaaccgatcttctcccgtgaaggcgcaaacgtgagcatcattgagaacggcaaaaccattgaagcagcggaaggtccgtatggcgaagaagggatgattgttcagcaattccacccgttaccgaaattcggcgacagctatatgctgattggtagctggctggtgaacgatcaacccgccggaattggcattcgtgaagaccgtgcattgatcacccaggatatgtctcggttttatccacatatttttgttgaataagccacgataccggatggcactcgccatccggtaattgttagcctatctgcacgctcagcatactcaggctgcccatttctataccctcaaccggaatggtaattggctcctgcccatcccacgcacctaacacatacaacaacggcaaataatgctctggcgttgggttgcttaacgtgccaccttcatggtcgaggtaattcaccagaggatgttgttccactggcccttgccacgtcagattcgctttcacatactcattaaagctcgtcgcccacggatacggactactatcaccgtgccacttcactgtgcgcaggttatgcaccacgttaccgctggcgaccaacattattccttcatctcgcagcgctgccagtttgcgccccatttcgaaatgccaggcggcaggtttgctactgtcgatactcaactgcaccatcgggatatcagcgtcaggatacatcttaatcagcacgccccagctgccgtggtcaaagccccaggcttctttatccagcgtcaccgggatcggcgctaacagctcaaccagacgctgtgccagcgcagggctacccggagcaggataatgcgtatcgtacagcgcctgcgggaagccaccaaagtcatgaatcgtgggcggcgtctccatcgcggtcactcctgttccacgggtaaaccagtgagcgctaaccaccacaatcgcttgcgggcgtggcaatgtcatccccaacttctgccagctgcgggtatacaaattatcttccagcacgttcatcggactaccgtgacctaaaaacaatgctggcatacgtgtactagacatgatgatatccttaactaaaggtgtcattttgatatcctcacaatacgcttgttcggcggagtaagaacccggataacaatgatgatgatcatcagttattttgacgatctgcctgaaggtgaagatttataaggagttgtcgatgagtgtacctctcattctgaccatactggcgggggcagccacgtttattggcgcgtttctcggcgttctcgggcaaaaacccagcaaccgcttactggcgtttagcctaggttttgcggcggggatcatgttgctcatcagtttaatggaaatgcttcctgccgcactagcagctgaaggaatgagccctgtgttgggttatggaatgtttatcttcggtctgcttggctattttggcctggaccgcatgttgccacatgctcatccgcaggatttaatgcaaaaaagcgtgcagccgttgccaaaaagcatcaagcgcacagccattctgctcactctcggcatcagtctgcataacttcccggaagggattgccacctttgtcacggcgagcagcaacctggagctgggatttggcatcgcactggccgtcgcgttgcacaatatccctgaaggtctggcagtggcaggcccggtttatgcggcaacggggtctaaacgcaccgcgattctgtgggcggggatttctggactagcagaaattcttggtggtgtgctggcgtggttaatcctcggtagcatgatttccccggtggtcatggcggcaatcatggcggcggttgcaggaattatggtggcgctcagcgttgatgaattaatgccgctcgccaaagagattgaccctaataataaccccagctatggcgtactatgtggaatgagtgtgatgggattcagtttagtgctgctacaaacggcgggaattggttaaaaacaacatcagaagttgtccagcgcatggacaacttctgccagcttcacgaaagccttattctaccttttcggctgtctcttctctcgtactgtttaagtatttgttccgcgcttcaagcagtgcgtctctgtcctggcgaaacgcccgacaataacgtttcaaatgcaggaaataacccaccacaaccagagcaatcaatacaatccagtaccaggcgataaacatccttttacccttaatatttaacaatactaaacatttagcgtataaatttcacatatcctttttcggatatattcatatggtcgcataataacggaacaattatatgattttgatcataatgaaaaagaatgcctgatattaatgaaattttctcatagaaagagaagcggaattaacatcttgcatagcagggaaaaataaaaaccgaagcctgctacaacttcggtttcttgattaaggcagtaaattaagcagcggttttcagctggctttacgctcatgtgcctgacggtatgccaccaggtcttcaatagtcacgagcgccatattgtgtttattggcaaactcaatacactctggtgcacgcgccatcgtgccatcgtcattagtcagctcacacagtacaccagccggtttaaagcctgccagcgtcatcagatcaatagttgcttcagtatgaccgccacgcgtcagtacaccacctgcctgagcgcgaagtgggaaaacgtggccaggacgattcagatcactcggttttgcgccatcggcaatcgctgcgcgaacggtcgtaatacggtcagcggcagaaacaccggtagtcacaccttcagctgcttcaatggtcacggtaaaaccggtgccataggcgctggtgttattttctaccatcattggcagatcgagttgtttacggcgatcttcagtaatgcacaggcaaacaataccgctaccgtggcgaatggtcagcgccatctgctcaacagtcatggtttctgccgggaagatcatatcaccttcgttttcacggtcttcatcatcaagcaccattacaccgcgtccttcacgcagcgcagccagtgcattttcaacacgttcgaaaggcgtaccaaaagaggaaagtagcgtctgattcatggtaaaaaaacctcactaaaattatggttaccagaatcagggcagtcttaggagtggcggcatatagccaaaataacgtgagcgggtccatgcccgacagaatcgttactctctcccatccggactctaaccgtcggccccggaattacaccggatctgctgtcctttgagttcgcacccaaagcgctcgcgggctttcaactgagttgatttaccgccggtggggaatttcgccccgccctgagaataagcggattcactataacgctaatgattagcggcagcaacgcatagcttcacataattctggtttatatctaatacaaacactaaaacgggccatcaggcccgttatatcagtgctctaactccagctctcttgcctgcatcatctgttgacaataccaggcataacgtgcgcaaaaccaggttctatgttcttcatccatgttaccagtaacggccagaatatcgaccgggcgaccttctgcgtgcattctggcaaaactacgcgccaggaaatcgaaattatttaaagaattaagactatgatccataagcacatcctccggttatcgcataccttttaaggccatatgctttttctgatttcagtattccccaatcagtgtagtgcctttaaacataacgtgcgtaaatatattgtccccgatcacactttttagtgaaaaataaaaaaccatattaaaagactttctcttccagaacttctctaacctgtgttattattaacacagataaatgtaagcaaggaaactattacaaagtaaatattgcgtcactaaatggacattggagtgatatatgattttattcgccgactataacaccccttatcttttcgctatttcctttgtactgttgatcggcctgttagaaatttttgcgcttatctgcggtcacatgctctccggtgctcttgatgcacatcttgaccattatgattctataaccacaggtcatattagccaggcacttcattatctcaatattggaagattgccagctctcgtcgttctctgcttactggctggtttttttggtcttattggcatcctgttgcagcatgcctgcatcatggtctggcaaagtccactgagcaacctgttcgtggttcctgtcagtttactgtttacgattattgcggtgcattataccggtaaaatagttgcgccctggattccacgcgaccatagtagtgctattacagaagaagaatatattggtagcatggcgttaattaccggtcatcaagccactagtggtaatccctgcgaaggaaaactcaccgatcaatttggccaaatacattatttactactggagcctgaagaaggaaaaattttcactaaaggagacaaagtgttaattatttgccgactttctgcaacgcgatatttggcggaaaataatccctggccccaaatattgtaatttattaatcaaaaggaaatttaataatggatgatattgttaattctgtgccctcctggatgtttaccgcaattattgccgtatgcattctgtttattattggaattattttcgccaggctctatcgtcgcgctagcgcagagcaagcttttgttcgtactggtttaggtgggcaaaaagtggtaatgagcggtggcgcaatcgtgatgccgatctttcatgaaataatccccatcaatatgaatactctgaagctggaagtcagccgcagtaccattgatagcctgattacgaaagatcgtatgcgcgtcgatgtagtagtcgctttctttgtgcgggtaaaacctagtgtagaagggattgccaccgctgcccagacgctggggcaacgcaccctgagccctgaagacttacgtatgttggttgaagataaatttgtcgatgccctccgtgcaacagctgcgcaaatgaccatgcatgagttacaggatacccgcgagaactttgtgcagggggtgcaaaatacagtggcagaagacctgagcaaaaacggtctggaactggagagcgttagtcttaccaactttaaccagaccagcaaagaacatttcaatccgaacaatgcctttgacgccgaaggtttaaccaaactgactcaggaaacagagcgccgtcgccgcgaacgtaacgaagttgaacaggatgtagaagttgcggtgcgtgaaaaaaatcgcgatgcgctaagccgcaagctggagattgaacagcaagaagcgtttatgacgcttgagcaggagcagcaggttaaaacccgtactgccgaacagaatgcacgtattgcggcttttgaagctgaacgtcgtcgtgaagcagagcagacacgaattctggctgaacgacagattcaggaaacagaaatcgaccgcgaacaggccgtccgcagtagaaaggttgaagctgaacgtgaagttcgcattaaagagatcgaacagcagcaggtcaccgaaatcgctaaccagacgaaaagcatcgctattgccgccaaaagcgaacaacagtcccaggcagaagcgcgtgctaatctcgcacttgcagaagcggtaagcgcccaacaaaacgtagaaaccactcgccagactgccgaagccgatcgtgctaaacaagttgccctaatcgctgccgcgcaggatgcagaaaccaaagcggttgaactgaccgtgcgggcgaaagcagaaaaagaagccgcagagatgcaggcggcggctatcgttgagttagccgaagctacacgtaaaaagggtctggcggaagcagaagcacaacgtgcgctgaacgatgctatcaacgtactttctgatgaacaaaccagccttaaattcaaactggccttgttgcaggcgctgcctgcggtaatagagaaatccgttgagccgatgaagagtatcgacggtatcaagattattcaggtcgatggtctgaatcgtggcggcgctgcgggtgatgcaaacacgggtaatgtggggggcggaaacctggcggaacaagcattaagtgccgctctctcttaccgcacacaggcaccgctgattgactccttgctcaatgaaattggcgttagtggcggcagtctggcggcattgactagtcccttaaccagtacaactcccgtcgaagaaaaagcagagtaaaccctcttccaggaataatccctggcccaaaaagccggggattttttatatctgcgttccgctaaaaagtgcaaatgatcaggttgttgcagcattttgcgtgacggctcggggaaggcaaaactgcatcagagaaagcattgcgtggggtctggcgctcatcaacaatcggggagtcagcagggggctgaaacgggaaagcccctcccgaagaagggggccttacagaaggaaagggttatgatgaagctcgtcatcatactgattgtgttgttactcgtaagtttcgcagcttattaacagccaatcagaggggggagaaatcctccctcacccttgttcctttactttaggttgaaaaaaaatcagcgtcaagaaggtttcattaacacatatccctggcccaaaaagccggggattttttatatctgcgttccgctaaaaggtgcaaatgctcaggacgttgcagcgttttgcgtgaccgctcggggaaggcaaaattgcctctgggaaagcattgcgcggggtccggcgctcatcaacaatcggggggcagcaaggggctgaaacgggaaagcccctcccgaagaaggggccttgtataaggaaagggttatgatgaagctcgtcatcatactggttgtgttgttactgttaagtttcccgacttactaacaactcatcagaggggggagaaatcctcccttacccttgttcctttactctaggttgaaaaaacaacagcgtcaataggcctgccatgtacgaagcgagatctgtgaaccgctttccggttagccttttttatcctgttggatcttcttgatgatgttggtcgtgctgcaaccgtcttcaaagttgagcaccaacacttcgccaccgttggcccagacttctttactcccggcaatctcttctggtttatagtcgccgcctttcaccagcagatctggcaagatcccggcgatcaagcgctgcggcgtgtcctcttcaaagctcactacccagtcgaccgcttccagtgcgcccagcacaatcatacgctgttcgagtgggtttaccgggcgggaatcccctttcagccgtttggtggaggcatcgctgttgacggcaacaatcaagcggtcacccagcttgcgggcatttgccagataagagacgtgcccggcgtgcaggatgtcaaagacaccgttggtcatcaccactttttcaccacgtttacgcgctgccgctacggccagcttcagttcctcttcggtcatcacgccaaagcctgtatctgcacgtccacgtacagcattttccagctcgatcgggctaaccgtggaggttcccagtttgccgaccaccacgccagccgccgcattggcaaagaagcaggcttcttccaggctattacccgctgccagcgttgccgccaggacgccaatcaccgtgtcgcccgcaccggtaacgtcatacacttcctgcgcttgggttggcatatgcagcggcgctttacccggttgcagcaggctcataccctgttcggaacgggtcactaacagagcgctgagttcgtaatcggcaatcagtttcatgccgcgctcaacaatctcttcttcggtcttacatttaccgacaacagcttcaaattcgctgagattcggcgttaacagcgtagcgccgcggtagcgctcaaaatcggtaccttttggatcaatcagcaccggaacacccgctttacgcgccagttggatcatctgctgtacgcttgccagcgcacctttggcgtagtcagaaagcaccagcgcgccaatgctactcagcgcctgattaatccgctcgtgcagcggctgcggatcaacaccttcgaaaccttcttcaaaatccagacggatcagctgttggttgcgggaaagtacccgtaatttggtaatggtcggatgcgtcggtacagaaacgaagtcgcatttgacgttgacgtcggccagagatttactcagcgcgcgcgctgcatcgtcaatgcccgtcaacccgaccaggcgtgcattagcaccgagagaagcgatattcatcgccacgttagccgcgccgcccggacgttcttcgatggtattcactttaaccacgggcaccggcgcttccgggctgatacgactggtggggccgtaccagtaacgatccagcatcacatcaccaaccaccatcactcctgcacgttcaaactctggcagcgttactttcattcctgtctcctgagagattcaaaatttgcgcgcgataataccatacttcattcttccaccagccacttctgccagcttgcccgcaccagttcacgctctgcggtgaagcaatcctcgctcacatggcccggcaattcctgtaatgccagatgatgaagttcatcgcgaagcgtagtgtaagcacgggtcagcgccatcgcttcctgctcttccataatgtcgttttgcgccagtagttccagaatacgcacgttgtcactccagcgcgttaacttcggtttttcatgagcgtagcgcaacaccagatattgggtaataaattcgatatcggtaattcccccttcatcagctttgatatcaaagcgatcgcgatgtttattgccgagatgagcgcgcattttctcgcgcatttcccgcacttccgtttgcagagttttaccttcacgcggcagcgtcataatctcgcgacgcactgcgtcaaagtgcgcggtgagctgcggatcgccgtacactacacgcgcacgcaccagcgcctgatgttcccacgtccaggcctcgtttttctgataatcggcaaatgcttctgcggatgtcaccagcattcccgccgccccggacggacgcagtcgagcatccacttcatacaaaatgccggaagaggtacgcgtactgaacagatgcataatgcgttgcgccagacgcagataaaactgccgcccgtcgatttcccgctcaccgtcagtcatcgcatccattgggcaatcatggaggaagataaggtcaagatcggaactgtagcctaactcccagccgcccagcttgccgtagccgaccaccgcaaaaccacgcccttcgcgttcgttcaggtgattcggcttaccgtagcgggcaaccatttgaacccacgcctgctgaacgacggcatctatcatggcttccgccagccaggttaagtgatcgctcactttcatcaccggtagcgtaccggcgatatccgctgcggcgatgcgtaacagctgcgcctgtttgaactgacgcagcgcctcaagctgttgctcttcgtcatcttccggcacgcgcagcaaatactggcgcaactcatcgcggtaggcatcggtcgccgtcggctggtaaagggtgtttggatcgagcaattcatccagcaataatggataacgcgccagctggctggcaatcatcgggctcgcggcacacagagaaatcaaatgtttaagcgccgcggggaattcactgagcaattctaaataggtggtgcgggtaacaatccccaccagcaaggcggtaatgcggctcagcgtaacggcagcgtcttcacgcgcacagacatcacttagcagatgcggcatcagatggtcgagcacctgacgtcctcgcggcccgatggtgcgcttatccagctctttgcggaaatcggcaatcagcgttagcacctgtttgcgatcatcctcgctaagatgcgccagcactggcgtagtgtcatcttcctgcaacgcatcctgccacagctcacgccactgttcgctcaggctctcttcctgagtttcactttcatcgtcgccaatcaattcattaaacacccggcgcacattggtcatatgtgcggtcagcgccccggtcagttgcggccagtcagcaaagtccatcgcccacgccagccgcgcacgattaagctcatcagaaggaagcgtctgggtttgttcgtcgttaatgctttgcagcaggttttccagacgccgcaggaacagatacgccactcgcaattgttcagcatcgttttcagaaagcagatgcagctcggcaatggcgctgagcgttggcagtaaagagcggctttgcaggctcggttcgcgtccgccgcgaatgagctggaacacctgaacgataaattcaatttcgcgaatgccgcctgcgccgagtttgatattgtcggtcaaaccacgtcgacgcacttcacgggcaatcatccctttcatgttgcgcaggctctgaatcacgctgaaatcgatgtaacgacggaaaacaaacgggcgcagcatcgcacgcaactcgttagcatagacgccttcgctatcgcccataatccgcgccttgaccatcgcgtaacgctcccagtcgcgcccctgctcctggtaataatcttccaacgcggcaaagctcagcaccagcgggccactttcgccaaacggacgcagccgcatatccacgcgatagacgaagccatcctgcgttggttgatccagcactttaatcagccgctgccccatgcgggtaaaaaactgcgcgttatccagttcccggcgtccaccctgcgtacaaccatgttccggccaggcaaaaatcagatcgatatcagaggagaaattcagctccccaccgcccagcttacccatgcctaaaatcagcagcggttgcgcttcgccctgcgcattgcacggcgttccccactcgcggcagcaggcgtcatacagccagtcacgcgccgcaacaatcagcgtctccgccagatagctgagctgctgcaatatgctctcttcagtaaccagtgccagcgtttgcgcccaggcgatgcgcaccataatgcgccgccggaatagccgcagctcgcgcattaacccggcttcgtcactcacattacagagcgcctcctgcaaccatgccgcgtaatgctgccattcgtcggcctgcggcggttggctttccagttccgtcagccactctggatgcgcaatcacgctgtcctgcacaaaatcactaaaagtaagtacactcttcgcctgtgcgctaagactttcctcggctaaaggctctggcagccgctcaacaacggtctgccagtactgctgtaacggactagagagcggcttcataagcgattttatccttgcctgattaacgttttccgctgtgcaaccagaacggttcctgattgtttgcctcattacggaaatgttcaatttcgatgcgttgcccggtcgcaatagcgtgatgcagcccctgccagttctccagccaggcttgcgcgacgacaggatcatagtaacccgccagcaacagtatactgtcaatatcacgcgtcaggcgtggcaactggtcacggtagcgatcgcctaacggctggcagaaaacgcttttcagttcagcggcatggcgggaaagatggatatcggcaaagcgtttgaaggagtcgctgattttgccctgcgctttggcatctaaaaatggctgccatgctttgcttaccaaccattcggtcaacgccagcttcgccattgccgtttcggtagagtagaccgccgtcacggcagacaccgcagaagcaatggtcgcctcgcattgagtcagcagatcacgtaagtgagtgctcgctttacgcggcacaataccaccgaacagcatcagcgtatgacggaccaggctaatggctgccagcacctgttctttcgccgcatcgttgccgcgtacccacagttcttcatgatactgccattgcgctaacgccagctcgagcgccgcttccagcccctgttccacatcggcttttgccgcaacatgcaaaatggtggtcggtttgatttcacgcgccggattgccctgcgccagatgatagccacgcgccgctttgctcaggctgccctggcgtaatccggtttggcttaccagttggttcgccagtttcagcaccgcgcgcgtgtcgccgctaagcagttccagttccagctcacagataggttcagcaaattcacccgctttcacttccccctggtcgagggcgatttcaatttggctaccatcgaccgccaccagccatttttcgcgataaaaatcggtgctgaacagcggctgcacgcgggaggcgagatcggcgggcaattcgccgttcggccagacttccgtcggtaactgcgccaggtcgagcgtcggttcgctcaacgccacgttatattccgggcgctgatgtaagccgcctgtcactcttcctgcaactttcatggtcatctcatagcgaccgttttcgccacgaatacgtaagcccatatcgtgcccacgcagccagttatccggcgtttcgtagtaaatattcagcaactgcacggggtcatggtgctcgccgcccagcgtattgagatggtcacgcaacgcctcaacggcactgtgattaacaataaactttaattcgatttcctgagccatggcctttacttatcggttatgtcacataagtgacgatgaacggcgaacttaatgcgatcttttttgtcagtagatagtattttgcgccaaattgccatgcaacgggcaatttgacgggcgtaaaagtttgaagcagtggcaagacctgacacagaggattccgattgatgtcgaatgctttgcgtagcgacactgatgccactactatcgttccactttccatgacaataacgacagcctgatgccaaaattacgcctgatcggattaactttactcgcacttagcgcgactgccgtcagtcacgctgaagaaacgcgctatgtttccgacgaactgaatacctgggtccgcagcggtccgggagatcattatcgcctcgtgggcacggttaacgccggcgaggaagtgaccttattacaaactgacgccaacaccaattatgcccaggtgaaagacagctctggccgtaccgcctggatcccgttgaaacaacttagcactgagccaagcctgcgctcccgtgtgccagatctggaaaatcaggtcaaaaccctgaccgataaactcaccaatatcgataacacctggaatcagcgcaccgcagaaatgcagcaaaaagtggcgcagagcgacagcgtgatcaacgggttaaaagaagaaaatcagaaactgaaaaacgagctgattgtcgcgcagaaaaaggtcgatgccgccagcgtacagctggatgacaaacagcgcaccatcatcatgcaatggtttatgtatggcggtggcgtgctggggcttggcttgctgctcggtctggtactgccgcacctgatcccaagccgcaaacgcaaagatcgctggatgaactaaatcgccttcttcgttgcactgtcttattattaggaattgtgtatttgacgaagggatgatggcgtgaagatttatctggtcggtggtgctgttcgggatgcattgttagggctaccggtcaaagacagagattgggtggtggtcggcagtacgccacaggagatgctcgacgcgggctaccagcaggtaggccgcgattttcctgtgtttctgcatccgcaaacgcatgaagagtatgcgctggcacgtaccgaacggaaatccggttccggttacaccggttttacttgctatgccgcaccggatgtcacgctggaagatgatcttaagcgtcgcgatctgaccattaatgcgctggcccaggacgataacggcgagattatcgacccgtacaacggtctgggcgatctgcaaaatcgtctgttgcgccatgtttcccccgcttttggcgaagatccgttacgcgtattgcgcgtggcgcgttttgctgcgcgttatgcccacctcggttttcgtattgccgatgaaactctggcgttgatgcgcgagatgacccatgcgggtgaactggaacacctgacgcctgaacgggtatggaaagagacggaaagcgccctcaccacccgcaatccacaggtgttcttccaggtactgcgcgattgcggcgcactgcgcgttttattcccggaaattgacgcactgtttggcgttccggcccctgccaagtggcatccggaaatcgatacgggtattcataccttaatgacgctcagtatggcggcgatgctgagtccgcaggtcgatgtccgtttcgcaactttatgccacgatctcggtaaagggctgacgccgccagaactctggccgcgtcatcatggtcatggcccggcgggtgttaagttagtggaacaactatgccagcgtctgcgcgtgccaaatgaaattcgcgatttagccagactggtggctgagtttcacgatctcatccacaccttcccaatgctgaacccaaaaaccatcgtcaaattatttgattccatcgatgcctggcgtaaaccgcagcgtgtcgagcaactggcgctgaccagcgaggctgacgtgcgcggcagaaccggttttgaaagtgcggactacccgcaaggccgctggttgcgcgaagcctgggaagtggcgcagagtgtgccgacaaaagccgtcgttgaagcgggatttaaaggtgtggagattcgcgaggagctgacccgacggcggattgcggcggtagccagctggaaggaacaacgttgcccaaagcctgaatgagtattgggcattttgccggatgcggcgtaaacgccttatccggctacatgtcaacgacagttgtaggcctgataagacgcgcaagcgtcgcatcaggcgttgattgccggatgcggcgtgaacgccttattcggcctacgcaatcgttgacaacgccaagcatccgacactattcctcaattaaaagaacacgacatacaccgcagccgccacaataaagcgataaatggcgaacgggataaagctaatgcgcttaatcaattgcaggaaggttttaatcgctatcagcgccaccacaaaagcggtgataaacccaacggcaaacatcgggatatcgccgcttgtcaggaagccccagcttttgtagagatcgagcgccgttgcgcccatcatcatcggcaccgccagcaggaagctaaactcggaagcagcgtaacggctcacccccatcagcatcccaccactaatggtcgccccggaacgggagaaacccggccacagcgccagacactggaaacagccaatcataaatgcctgacgataggtcatatcatcaagacccggcgcacgcggctctttcggcttcaggcattcggcggcaatcagcaacaaaccgccaacgaccagcgcatacatcacatttatcgggttaaacaaactcttaatcgtgtcgtggaacaacagccccaataccaccgccggaatcatccccagcaaaatgtggatcagcgttaaacgacctttgctttcaccttcgtgctgcaacgggcggccaaagtggatgccaatcaggccaaacagacgccgccagaacatcactactaccgccagaatacttcctaactggatcacaacttcaaaggttttcgccgtgtcgccctcaaaccccaacaagtgaccgacaataatcatatggcccgtgctggataccggcagaaattctgtcaatccttcgaccacacccaatattgccgctatcagcaggctgtgcatatcgctcatcaataaacccctaaattattaaaatgtaccgcttgtccgaactactgcgtatgaccaggttataaccgtttggtttaacagctgtaaaattaattattttctttcagattattgccacgctcaatgattacgccaacattcgccgcccgcgccactgcgcctggcttgctgagtttgatacgcacccacgggctgttgaagcgtgctaacagcagctccgccacctcttcagccacgcgttccaccagcgcaaaacgcgccccctcgacgtggctgaccaccgtttctgcaatgtcagcgtaactgaggcaatccgccacatcatcacttttcgccgctttacggttatcccacgccatttcgatatcgaacactaacttctgttcgatggtctgttcccagtcgtaaacaccaatagtggtgattacgctaagttgctctataaatacaatatccatcacgtcctgcctgctttttggctaaccggataccacttccggcgaaatgtgcgtattatccacagattcatcgttgaacacgaattttcaaaacggaacagcttatgagtgcaatcgcgcctggaatgatcctcatcgcgtacctctgcggctccatttccagtgccattctggtttgccgcttgtgtgggctgcccgatccgcgaaccagcggctccggcaatccaggcgcaaccaatgtgttacgtatcggtggcaagggagcagccgtagcagtactgattttcgacgttctgaaaggaatgttgcccgtctggggcgcgtatgaattaggtgtcagccccttctggctaggcttaattgccatcgccgcctgtcttggacacatctggcccgttttcttcggatttaaaggaggaaaaggcgttgctaccgcttttggtgccatcgcacccattggctgggatctcaccggagtaatggcgggaacctggttactgaccgtgctattgagcggatacagcagcctgggagcgattgtcagtgcactgattgctccgttttatgtctggtggtttaagccacaattcaccttcccggttagcatgctctcttgcctgatcctgctgcgtcatcatgacaacatccaacgtctgtggcgtcgtcaggagacaaaaatctggacgaaattcaaaagaaagcgcgaaaaggatcccgagtgatttctggtggatttacatgacctgatagccttcatcgggcttgcccagccgttgctggcaccatgccgccagaaattccacgcagacacgtaatttcatgctgcgatagagcggctcccggtaaacagcccagatattggcgctttgtgcatactctggcaatacttgcaccagtttgccactctccagaaacggcaacacatcccactcggaacgcagcataatccctttaccctccagcgcccattgcagcacaatctcgccgctattggaggaaagatgcccgcttaccttcacgctttttttctcctgaccgttccccaactcccatattccatgggtcatatcgcgctctttggtcaccagacagtcatgacgacttaattcctgtagggattgtggctgcggatatttttgcagatactcaggtgctgcgcataatattcttttattttttgtcaaaagatgcgcaatataataatcaggaatttcgtcattaatacgaatatccagatcaatattatcctgcactaaatcaatttgccgatcgaacaattcaaaatgcacctgtaactcaggataattgcgcatcagttcggtaatagctggcgcaatatggctgcgcccaaaaccaaaactgcaaccaatacgaatcatcccctccgggcgcgttttgatttgcgtgacgtcatcgaccagtcgctgatattgggtgaggatttccaacgcatgttcgtaacaacgttggccactttcagtcagcgccacgccgcgagcggagcggttcagcagcgttgttgccagcgtattttcaaggatttggatccgcttggtgacaaatgcaggcgtctgcccaagcgtcgccgctgcggcgctaaaactcccgctgtgaacgatttctaccagtacctgcaagtctttggctaaaggccagctattcagcatcgttaattatccgcagttgtgataagcgcagtgtatttcgcaaaacattgccattccctgctctggcgcaatattcattcttattttcgcgttgattcacgaactgttaattacatattcacggtggcaaaaaatataaaaccacatttttagtggtagtttgtggcggtgaatttttccagacaaatacaaaaactggagttgccatgatgagcgaaagtaataagcaacaggcagtgaataagttgacagagattgtcgctaactttaccgccatgatttctacccgaatgcctgatgacgtggtggataaactaaaacagctaaaggatgccgaaacgagcagcatggggaaaattatctaccatacgatgttcgacaacatgcaaaaagcgattgacctgaatcgtcctgcctgtcaggacaccggggagattatgttcttcgttaaagtcggttcccgcttcccactgcttggcgagctgcaaagcatactcaaacaagccgtggaagaggcaaccgtcaaagcgccactacgtcacaatgcggtagaaatttttgacgaagtaaacaccggcaaaaataccggtagcggcgtaccgtgggtcacctgggacatcatccccgacaatgacgatgcggaaatcgaagtttacatggcaggcggcggctgcacgctacctggccgcagcaaagtgttaatgccgagtgaaggctacgaaggcgtggtgaaattcgtcttcgaaaatatctccaccctcgccgtaaacgcctgtccaccggtactggtgggcgtgggcatcgccaccagcgtggaaaccgccgccgtactcagccgtaaagccattttgcgcccgattggcagccgccatcccaatccaaaagcggcagaactggagctacgcctggaagaaggactcaaccgtctggggattggtccacaagggctgaccggcaacagtagtgtgatgggcgtacatatcgaatctgccgcccgccatccgagtaccatcggcgttgctgtctctaccggctgctgggcgcatcgtcgcggcacgctgctggttcatgccgatctcacctttgaaaatctgtctcacacccggagcgcgttatgaaaaagatcctgacaaccccgatcaaagctgaagatctgcaagatattcgcgtcggcgatgtgatctacctgaccggtacgctggtgacctgccgcgacgtttgtcaccgccgtttgatcgaactgaaacgtccgatcccttacgatctcaacggcaaagcgattttccacgctggccccatcgtgcgcaaaaacggcgacaaatgggagatggtctccgtcggcccgacaaccagtatgcgtatggaaagttttgaacgtgaatttattgagcagaccggcgtgaaactggtggttggcaaaggtggtatggggccgctgaccgaagaaggctgccagaaattcaaggcgctacatgtgattttcccggcaggctgcgcggtgctggcggcaacccaggtggaagagattgaagaagtgcactggacagagctcggaatgccggagagtctgtgggtctgccgggtcaaagagttcggcccgctgattgtctctattgatacccacggcaacaacctgatagccgaaaacaaaaagctgttcgccgaacgccgcgatcccatcgtggaagagatctgcgagcacgtccattacatcaaataaccctcccggagaggctcacccctctcctttttcgcaggcataacacgatgaaaccttccactgaatggtggcgatatcttgcgccgctggcggtcatcgccattattgctctacttccggttcccgcagggctggagaaccatacctggctctactttgccgtttttactggcgtgatcgttggactgatcctcgaacccgtgccgggtgccgtggtggcgatggtgggtatatccatcatcgccatactctctccctggctgctgttcagcccggagcagctcgctcagccaggctttaaattcactgcaaaatccctcagctgggccgtttccggtttttctaatagcgttatctggctgattttcgccgcctttatgtttggcacaggctatgaaaaaaccgggcttggacgccgcattgcgctgattctggtgaaaaagatgggacatcgcacgctgtttctcggctatgcggtgatgttctccgagctgatcctcgcacctgtaacaccgtccaacagcgcgcgtggtgcggggattatctatcccatcatccgtaacctgccaccgctctatcaaagtcaaccaaacgacagcagtagccgcagcattggcagctacatcatgtggatggggattgttgccgactgcgtgaccagcgccattttcttgacggcgatggcaccaaacttgctgttaattggactgatgaaaagcgcatctcacgccacgctgagttggggcgactggttcctcgggatgttgccgctcagcattttactggttctgctggttccctggctggcttacgtgctgtacccgccggtactgaagtctggcgatcaggtgccgcgctgggcagagacggaactgcaggcaatgggcccgctctgtagccgtgaaaaacggatgctggggctgatggtaggcgcgctggtgctgtggattttcggcggtgattatatcgatgccgcgatggtcggttacagcgtggtggcactgatgctgcttctgcgcattatcagttgggacgacattgtcagtaataaagcggcgtggaacgttttcttctggctggccagccttatcaccctcgccaccggactcaacaacaccggttttattagctggtttggcaaactgttagcaggcagcttaagcggttatagcccaacgatggtgatggtggcgttgattgtggtgttttatctactgcgctactttttcgccagcgccacggcgtatacctccgctctcgcaccgatgatgattgctgctgcgctggcgatgccggaaatcccgctgccggtgttctgcctgatggttggtgcggcaattggtctggggagcattcttacaccatacgccaccggccccagtccgatttactacggcagtggttatctgccaacggcggattactggcgactgggggcgatttttgggctgatattcctcgtattgctggtgattaccggcttactgtggatgcccgtggtgttgctttaagtgaggacggtgccggaaattgctctccggcacccaatagttttacgcagccggtaactccgccagcggccagcgcggacgcacgctaacgccgagatccgccgtcgcgcctgctttaaaccgcaccattccggcataggcgatcatcgcgccgttatcagtacaaaattccggacgcgcgtagaacacttcgccgcggcgttttttcatcatttcagccagcttcgcccgtaacgtacggttagcactcacgccgcccgccatgaccagtcgcttaaagcccgtctgacccagcgcccgcttgcacttaatcatcagcgtatcgaccaccgcatcttcaaaggcgcgggcgatatcagcacgcgtctggtcgtcggtgccgttgtcacgaatggtatttgccgcgaaggttttcaggccggagaagctgaaatccagccccggacggtcggtcatcggacgcgggaagacaaagcgcccggcagtaccctgagccgccattttgctcagtaacggcccgccaggataatccagccccagcagcttcgcggttttatcaaacgcttccccggcggcatcatcgatagactcgccgagcagctcgtactgaccaatgccagtcacgctgattaactgcgtatgaccgccggaaacaagcagcgcaacaaacggaaattccggcgggttatcttccagcatcggcgctaacagatgcccttccatatggtgtacagggatcgccggaacgtcccaggcaaacgccagagaacgccccacggtcgcgccaaccagtagcgcgccgactaatccagggcctgcggtataggccacagcatcaatgtcttttgccgttaaaccagactcctttagcgccgcctggatcaacggtacggttttacgcacatgatcgcgggaggccagttcaggcacgacgccgccgtagtcagcgtgcaatttcacctgactatacaattggttggctaacaaacctttttcatcgtcgtaaatggcgatgccggtttcatcgcaggaagtttcaatacccagtacacgcatgacttgttttacctcgctttattaccgcgcagtgtaggaccaatgcgggttgatgtaaaactttgttcgcccctggagaaagcctcgtgtatactcctcacccttataaaagtccctttcaaaaaaggccgcggtgctttacaaagcagcagcaattgcagtaaaattccgcaccattttgaaataagctggcgttgatgccagcggcaaaccgaattaatcaaaggtgagaggcacatgccggtaattaaagtacgtgaaaacgagccgttcgacgtagctctgcgtcgcttcaagcgttcctgcgaaaaagcaggtgttctggcggaagttcgtcgtcgtgagttctatgaaaaaccgactaccgaacgtaagcgcgctaaagcttctgcagtgaaacgtcacgcgaagaaactggctcgcgaaaacgcacgccgcactcgtctgtactaattccccgagagcgttgctctccgatcagaccgagttgtagttgtaaggccgtgcttccgaaaggaatgcgcggcttattttcgtttatgaattgctaaaaatcggggcctatggctggacgaatcccacgcgtattcattaatgatctgctggcacgcactgacatcgtcgatctgatcgatgcccgtgtgaagctgaaaaagcagggcaagaatttccacgcgtgttgtccattccacaacgagaaaaccccgtccttcaccgttaacggtgagaaacagttttaccactgctttggatgtggcgcgcacggcaacgcgatcgacttcctgatgaactacgacaagctcgagttcgtcgaaacggtcgaagagctggcagcaatgcacaatcttgaagtgccatttgaagcaggcagcggccccagccagatcgagcgccatcagaggcaaacgctttatcagttgatggacggtctgaatacgttttaccaacaatctttacaacaacctgttgccacgtctgcgcgccagtatctggaaaaacgcggattaagccacgaggttatcgctcgctttgcgattggttttgcgccccccggctgggacaacgtcctgaagcggtttggcggcaatccagaaaatcgccagagtttgattgatgcggggatgttggtcactaacgatcagggacgcagttacgatcgtttccgcgagcgggtgatgttccccattcgcgataaacgcggtcgggtgattggttttggcgggcgcgtgctgggcaacgatacccccaaatacctgaacagcccggaaacagacattttccataaaggccgccagctttacggtctttatgaagcgcagcaggataacgctgaacccaatcgtctgcttgtggtcgaaggctatatggacgtggtggcgctggcgcaatacggcattaattacgccgttgcgagcttaggtacgagtaccaccgccgatcacatacaactgttgttccgcgcgaccaacaatgtcatttgctgttatgacggcgaccgtgcaggccgcgatgccgcctggcgagcgctggaaacggcgctgccttacatgacagacggccgtcagctacgctttatgtttttgcctgatggcgaagaccctgacacgctagtacgaaaagaaggtaaagaagcgtttgaagcgcggatggagcaggcgatgccactctccgcatttctgtttaacagtctgatgccgcaagttgatctgagtacccctgacgggcgcgcacgtttgagtacgctggcactaccattgataagccaagtgccgggcgaaacgctgcgaatatatcttcgtcaggaattaggcaacaaattaggcatacttgatgacagccagcttgaacgattaatgccaaaagcggcagagagcggcgtttctcgccctgttccgcagctaaaacgcacgaccatgcgtatacttatagggttgctggtgcaaaatccagaattagcgacgttggtcccgccgcttgagaatctggatgaaaataagctccctggacttggcttattcagagaactggtcaacacttgtctctcccagccaggtctgaccaccgggcaacttttagagcactatcgtggtacaaataatgctgccacccttgaaaaactgagcatgtgggacgatatagcagataagaatattgctgagcaaaccttcaccgacagtctcaaccatatgtttgatagcctgcttgaactgcgccaggaagagttaatcgctcgtgagcgcacgcatggtttaagcaacgaagaacgcctggagctctggacattaaaccaggagctggcgaaaaagtgatttaacggcttaagtgccgaagagcgatcgggaagcccccgacagccgcactgagaggcagcggcaaatatataagtacgccctcgtaattatcgttggcggtaaacaaccgttggatttcagcgttaacggctgaaggacatcgggtcaatcgcccaacaccaacctcatgaaataagtgtggataccgtcttatggagcaaaacccgcagagtcagctgaaacttcttgtcacccgtggtaaggagcaaggctatctgacctatgccgaggtcaatgaccatctgccggaagatatcgtcgatagtgatcagatcgaagacatcatccaaatgatcaacgacatgggcattcaggtgatggaagaagcaccggatgccgatgatctgatgctggctgaaaacaccgcggacgaagatgctgccgaagccgccgcgcaggtgctttccagcgtggaatctgaaatcgggcgcacgactgacccggtacgcatgtacatgcgtgaaatgggcaccgttgaactgttgacccgcgaaggcgaaattgacatcgctaagcgtattgaagacgggatcaaccaggttcaatgctccgttgctgaatatccggaagcgatcacctatctgctggaacagtacgatcgtgttgaagcagaagaagcgcgtctgtccgatctgatcaccggctttgttgacccgaacgcagaagaagatctggcacctaccgccactcacgtcggttctgagctttcccaggaagatctggacgatgacgaagatgaagacgaagaagatggcgatgacgacagcgccgatgatgacaacagcatcgacccggaactggctcgcgaaaaatttgcggaactacgcgctcagtacgttgtaacgcgtgacaccatcaaagcgaaaggtcgcagtcacgctaccgctcaggaagagatcctgaaactgtctgaagtattcaaacagttccgcctggtgccgaagcagtttgactacctggtcaacagcatgcgcgtcatgatggaccgcgttcgtacgcaagaacgtctgatcatgaagctctgcgttgagcagtgcaaaatgccgaagaaaaacttcattaccctgtttaccggcaacgaaaccagcgatacctggttcaacgcggcaattgcgatgaacaagccgtggagcgaaaaactgcacgatgtctctgaagaagtgcatcgcgccctgcaaaaactgcagcagattgaagaagaaaccggcctgaccatcgagcaggttaaagatatcaaccgtcgtatgtccatcggtgaagcgaaagcccgccgtgcgaagaaagagatggttgaagcgaacttacgtctggttatttctatcgctaagaaatacaccaaccgtggcttgcagttccttgacctgattcaggaaggcaacatcggtctgatgaaagcggttgataaattcgaataccgccgtggttacaagttctccacctacgcaacctggtggatccgtcaggcgatcacccgctctatcgcggatcaggcgcgcaccatccgtattccggtgcatatgattgagaccatcaacaagctcaaccgtatttctcgccagatgctgcaagagatgggccgtgaaccgacgccggaagaactggctgaacgtatgctgatgccggaagacaagatccgcaaagtgctgaagatcgccaaagagccaatctccatggaaacgccgatcggtgatgatgaagatagccatctgggggatttcatcgaggataccaccctcgagctgccgctggattctgcgaccaccgaaagcctgcgtgcggcaacgcacgacgtgctggctggcctgaccgcgcgtgaagcaaaagttctgcgtatgcgtttcggtatcgatatgaacaccgactacacgctggaagaagtgggtaaacagttcgacgttacccgcgaacgtatccgtcagatcgaagcgaaggcgctgcgcaaactgcgtcacccgagccgttctgaagtgctgcgtagcttcctggacgattaatcggtaggccggatcaggcgttacgccgcacccggcactaggccctctgcacaaacgccaccttttcggtggcgttttttatcgcccacgcactaccagcgcctggtccagctcgcgatacgcttcaaccagtttctccagactaacgcgacttaaaccgctgggatttggcagcacccaaatctgcgtgctaccaatggtgagcgtttgtttcccccactgtgcaccgcgctggctgaatccctgttcatatgcttgtttgcccagaatcgccaacgcctgcggctgataatcttcaattttttcaatcagcttacgcccgcctgcgtgtagctcctgcttactaacttcattggcttgcaccgttggacggtctaccagtttggtgacgccacaacgataatccagcagatgctgtgcctcctgcggcttcaactgacggtcggtaaacccggcctgatatatcaccttccagaagcgatttgccggatgagcaaagggaaaaccagtcccggcggaactaagcccagggttgataccgcaaaacacgacccgtaaccctggagccaaaatatcctcaaccatatttactcctttctaacatcaccaggaaaagtataacggattgaaaatacattgtttataaaaacagcaggcgcgcggtaatggctggattgcgacacggagttactttataatccgctaccatggccccttagctcagtggttagagcaggcgactcataatcgcttggtcgctggttcaagtccagcaggggccaccagatatagcaaaggctgacgagaaatcgtcagcctttttctttttatatatcagttactttgcgtgccagtaagccgctgcacgtacccgctgtgggtcatactgttccgcttcaaagcggcggcttaaattcttaacgactttaccttcgccggttatccagatgaagtaatcatcggcagggatttgcatctgcgccagacgcgcatctaccgcctgctcatcatgtgccagccattcgatattaaaaccatcaaggtgcgcgagataatcctgacaggcgttatcccgcacgctaaccagcgcactaacttgcggtttaacggcaagtttgctcaacgtttccaggcggcggcgcaatgcaggcattccggattcatcgcagacatacagctgatacgcgtaatcttccggcaccaccaggctaccgcgcggacctgccaccgtaagtttatcgcccggttgcgcctgcatcgcccagccgctggcgaccccaccgtcgtgaataaagaaatcaatcgccagttcatggcgtagttcgtcatacagcggcgtatagtcacggctcggtgggcgtggtccttccggccagacgatgccctcttccgttaccgttggcggcacaaagtgagcgtcaggttgaggaaagaagagtttgctgtgatcgtcaaagccacggcttgtaaaaccgtccagcgcctcgccgccgaggacaatgcgctgaaaaccggcgctgatgcgctcaacgcgtaacacagtcagttcacggaagcgcagatcattgcgaacgcgctgcgggtagcggggggtgttattcattgttatcgccttcgtgatggtaatcagatatatctaaataaaactcgcaaatgataatgattgttaatcatgataaatgcaagcgatttgtagaactgatatgtctatagtctgataagacgaaccgcctcttctcaggcatcattactcaacgccggatgcggcgtgaacgccttatccggcctacgtgtgagatgagtccacgtttaaaaatcatttttacacttgcaagaacgctcatatcagatataaattagatatatctaattaagcaaaaggaggctgatatgagccatcatcacgaagggtgttgtaaacatgaaggccagccacgccatgagggctgctgcaaaggtgagaagagtgaacacgagcactgcggacacggtcaccagcatgaacacggtcaatgctgcggtggtcgccacggtcgcggcggcggtcgtcggcaacgtttctttggtcacggtgaattacgtctggtgattctggatattctcagccgcgatgacagccacggttacgaattgattaaagcgattgagaatctaacccaggggaattacaccccaagcccgggcgtcatctacccaacgctggattttctgcaggagcagagcctgattaccatccgcgaagaggaaggaggtaagaagcagattgcgctgaccgaacaaggcgcgcagtggctggaagaaaaccgcgaacaggtggagatgattgaagaacgcatcaaagcgcgttgcgttggcgcggcgctgcgccagaacccgcaaatgaagcgggcgctggataattttaaagcggtgctggatttacgcgtcaaccagagcgatatcagtgatgcacaaataaaaaagatcattgcggtgatcgaccgcgccgcttttgatattacgcaactggattaatcgccgcatccgccagtggcgcggtgcaattgccggatgcgacgcttgacgcgccttatccggcctacacccgctacacaccccgcaggcctgataagatgcgccagcatcgcatcaggcattgtgctccaaccgccggatccggcataccgattaatgcagtaccgtcaccgcgtcttccagtcggctggcgcggtgtttcaccatcgcgctcacctgcgcactctcttccaccagctcggcatttttctgggtgatcaggttaagctcatccactgcacgggtcaggctggaaagcccatcggcctgttccagcgtactatggctaatctgggcgatcaactgggtgacgtttttcacctgtgccacaatatcttccatcgtccgtccggcggcgtgtacctgctggctaccggattgcaccttatcagcactggcatcaatcagcttgcgaatatcgttggcagcattagcgctgcggctggctaaatgacgcacttcccctgccaccactgcaaaacctttgccctgttcgccggcacgcgccgcttccaccgccgcattcagggccagaatattggtctgaaacgcaatatcgttaatcaggctagtaatggtgccaatgcgctgggtactgtcggcgatatcgtccattgtcttgatcaccgtggtcatcgcctccccaccctgcactgccgcattactggcagtgatactcagtttatcggcagcgctcgccgtggcagagttctgtttcacgctcgccgccatttggttcatggtcgccaccgtttgctgaacgttatcaactgtctgctgggtatgttcgttcagttcatcggtgcctttcgccagcgtctcactgccatttctgacactggacacctggctactgacatcgttaattagccaacggcacatcaggccaagttgccctaccgcacgtaatgtcagccccagctcatcgctgcgattcagatgctcaacactattacgttctccggtcgccaccttcagtgcctgatgggcaacattttctatcgggcgcacaatctgccattcaaaacaggcgcttgccaacaataccactaacgcacagaggatatacgtcaccaccggggcagcaacaaaccaaagcatggccgccagcaagataaacatcagggtcatcactccacgcgcccgccagcgaagcggtaaactaggcagtttacccagccagcctttacgcaccaccaggcctttatgaatacgcttactggtacgtccggcgttcaacgctttgtacagcggctccaccgccgcgatctcttcatccgtcgcccgggtacgaatgctcatatagccactgatttttccctcgcgcaccatcggtaccgcattggcccgcacccaataatggtcaccatttttgcggcgatttttcacgatgccgctccagggctccccttttttcagggtgaaccacatatccgcaaacgccgcttttggcatatccgggtgacgcaccatgttgtgcggctgcccttgtaactcttgcaaggtatagccgctcacctgcacaaaagtgtcattagcatgagtgatatagctttgcagatcggtagtggacatcagagtggtatcgtccgccagcggggtattttgctgggtgacatacggatgagaagacatgttcgcgtcctgtgcaggttatatggttgttaacttcttgtcagagtttatgtcggccccgctgcggttatctttaaccgattaatttgatttagatcgcaatttgcgatttaaacacaaatctaattccttgatttaaaatactttcactctgttactatacgaaaacgttaattatcttgcccaaaaatcaggcaattattgccctgaaaacgtgcatttgcgcagcaatcatcaaatccatacccgacaaaaaccgtgcaaaataacaacaaatgttaacagatagcattaaatattgcacaaatgataaccgaatttgtgtttatcccgattttcgcgatcgcagccggagtggcgcaatccctgcaatacttaaatcggtatcatgtgatacgcgagcctccggagcatattttgaacaggttacctagcagcgcaagcgctttagcgtgcagcgcccacgccctgaatctcattgagaagcgaacgctggatcatgaggagatgaaagcacttaaccgagaggtgattgaatacttcaaagagcatgtcaatccggggtttttagagtatcgcaaatctgttaccgccggcggggattacggagccgtagagtggcaagcgggaagtttaaatacgcttgtcgacacccagggccaggagtttatcgactgcctgggaggttttggaattttcaacgtggggcaccgtaatccagttgtggtttccgccgtacagaatcaacttgcgaaacaaccgctgcacagccaggagctgctcgatccgttacgggcgatgttggcgaaaacccttgctgcgctaacgcccggtaaactgaaatacagcttcttctgtaatagcggcaccgagtccgttgaagcagcgctgaagctggcgaaagcttaccagagtccgcgcggcaagtttacttttattgccaccagcggcgcgttccacggtaaaagtcttggcgcgctgagcgccacggcgaaaagcaccttccgcaaaccgtttatgccgttactgccgggcttccgtcatgtgccgtttggcaatatcgaagccatgcgcacggctcttaacgagtgcaaaaaaaccggtgatgatgtggctgcggtgatcctcgaaccgattcagggtgaaggtggcgtaattctgccgccgccgggctatctcaccgccgtacgtaagctatgcgatgagttcggcgcactgatgatcctcgatgaagtacaaacgggcatggggcgcacgggcaagatgttcgcctgcgagcatgagaacgtacagccggatatcctctgccttgccaaagcgctcggcggcggcgtgatgccgattggcgcgaccatcgccactgaagaggtgtttagtgttctgttcgacaacccattcctgcataccaccacctttggcggcaacccgctggcctgtgcggcggcgctggcgaccatcaatgtgttgctggagcagaacttaccggctcaggctgagcaaaaaggcgatatgttgctggacggtttccgtcaactggcgcgggaatatcccgatctggtacaggaagcgcgtggtaaagggatgttgatggcgattgagtttgttgataacgaaatcggctataactttgccagcgagatgttccgccagcgcgtactggtggccggaacgctcaataacgccaaaacgatccgcattgaaccgccactgacactgaccattgaacagtgtgaactggtgatcaaagcggcgcgtaaggcgctggcggccatgcgagtaagtgtcgaagaagcgtaatatcaaatcggatggcgatacgacgtcgccatccgatctttttatacgacgcgtacgcccgcaggcatcatccgctccggcgttaacagcacgctttcactgccgtcatcggtttccgcacacaacagcatgcattcgctcgtttcaccacgcattttcgctttttgcagattgcataagaccaccaccgttttccccatcagctcttcttcgctgtagtacggcaccaggctggtcacggtttgcagcgttttttgccccacatcaacctgtacgatgtacagcttgtcggcgttttcatggcgtttcacttccacaatctttccgacgcgcatttccagacgtgcaaaatcagcgtaagccacggtttccattgcttcctcccttagggtaaaattttactaaactatagcaaaagtttttctcaatcctgtaggctaaaaatggagaatgcaggcgtgatcacattcgtgagccgctgtgttaccgttacagcgtcaaagaaacgcgctttatttactgaaaacaggtgacccgataagcacttcctctacaatgggggcgcacatcagggaaagtaaaaaaggtaaacatggcaacactaaaagacatcgcaatcgaagctggcgtatccctggcgacagtatccagggtcttaaatgacgatccgacattgaatgtgaaagaagagacgaaacatcgcattctcgagatcgccgaaaagctggagtacaagaccagtagtgcccgtaaactccagacaggtgcagtcaaccaacaccatattctggctatctacagctaccagcaggagctggagatcaacgatccttactatctggcgatccgccacggcattgaaacccagtgcgaaaagctgggcatcgagctcaccaactgttatgaacacagcggcttaccagacattaaaaacgtcaccggtattttaattgtcggcaaacccacgcccgccctgcgcgccgctgccagcgcgttgaccgacaatatctgttttatcgactttcacgaacccggcagcggttacgatgcggtggatatcgatctggcacgcatcagtaaagaaatcatcgacttctatatcaaccagggcgttaatcgtattggttttattggcggtgaagatgagcctggcaaggcggatattcgtgaggtcgcctttgcggaatatggccgactgaaacaagtggtacgcgaagaggatatctggcgcggcggtttttccagtagcagcggttatgaactggcaaaacaaatgctggcgcgggaagactatccgaaggcactgtttgttgcttccgattccattgctatcggcgtactgcgggcaattcatgaacgaggcctgaacatcccacaggatattagccttatcagcgttaacgatatccccaccgcgcgatttacctttccgccgctctccaccgtgcgcatccattccgagatgatgggaagtcagggcgttaacctggtgtatgaaaaagcccgcgatggtcgcgcgctgccgctgttagtcttcgttcccagcaaattaaaactgcgcggcacgacccgttaaatccccttacacactgtccggcaatcgtttttgccggacagtgctgccgtttattttcgtgatccagttaaagtaaatgcatttacctgctactttttagtaaaaattttactaaactccccagcaattacacaaactaccatcaccatgaatggttccgatttctctctaccgggaggccctatgaatcgctgggaaaacattcagctcacccacgaaaaccgacttgcgccgcgtgcgtacttttttagttatgattctgttgcgcaagcgcgtacctttgcccgcgaaaccagcagcctgtttctgcccttaagcggtcagtggaatttccacttttttgaccatccgctgcaagtaccagaagccttcacctctgagttaatggctgactgggggcatattaccgtccccgccatgtggcaaatggaaggtcacggcaaactgcaatataccgacgaaggttttccgttccccatcgatgtgccgtttgtccccagcgataacccaaccggtgcctatcaacgtattttcaccctcagcgacggctggcagggtaaacagacgctgattaaatttgacggcgtcgaaacctattttgaagtctatgttaacggtcagtatgtgggtttcagcaagggcagtcgcctgaccgcagagtttgacatcagcgcgatggttaaaaccggcgacaacctgttgtgtgtgcgcgtgatgcagtgggcggactctacctacgtggaagaccaggatatgtggtggagtgcggggatcttccgcgatgtttatctggtcggaaaacacctaacgcatattaacgatttcactgtgcgtaccgactttgacgaagcctattgcgatgccacgctttcctgcgaagtggtgctggaaaatctcgccgcctcccctgtcgtcacgacgctggaatataccctgtttgatggcgaacgcgtggtgcacagcagcgccattgatcatttggcaattgaaaaactgaccagcgccagctttgcttttactgtcgaacagccgcagcaatggagtgcagaatccccttatctttaccatctggtcatgacgctgaaagacgccaacggcaacgttctggaagtggtgccacaacgcgttggcttccgtgatatcaaagtgcgcgacggtctgttctggatcaataaccgttatgtgatgctgcacggcgtcaaccgtcacgacaacgatcatcgcaaaggccgcgccgttggaatggatcgcgtcgagaaagatctccagttgatgaagcagcacaatatcaactccgtgcgtaccgctcactacccgaacgatccgcgtttttacgaactgtgtgatatctacggcctgtttgtgatggcggaaaccgacgtcgaaagccacggctttgctaatgtcggcgatattagccgtattaccgacgatccgcagtgggaaaaagtctacgtcgagcgcattgttcgccatatccacgcgcagaaaaaccatccgagcatcatcatctggagcctgggcaatgaatccggctatggctgtaacatccgcgcgatgtaccatgcggcgaaagcgctggatgacacgcgactggtgcattacgaagaagatcgcgatgctgaagtggtcgatattatttccaccatgtacacccgcgtgccgctgatgaatgagtttggtgaatacccgcatccgaagccgcgcatcatctgtgaatatgctcatgcgatggggaacggaccgggcgggctgacggagtaccagaacgtcttctataagcacgattgcattcagggtcattatgtctgggagtggtgcgaccacgggatccaggcacaggacgaccacggcaatgtctggtataaattcggcggcgactacggcgactatcccaacaactataacttctgtcttgatggtttgatctattccgatcagacgccgggaccgggcctgaaagagtacaaacaggttatcgcgccggtaaaaatccacgcgcgggatctgactcgcggcgagttgaaagtcgaaaataaactgtggtttaccacgcttgatgactacaccctgcacgcagaggtgcgcgccgaaggtgaaacgctcgcgacgcagcagattaaactgcgcgacgttgcgccgaacagcgaagcccccttgcagatcacgctgccgcagctggacgcccgcgaagcgttcctcaacattacggtgaccaaagattcccgcacccgctacagcgaagccggacaccctatcgccacttatcagttcccgctgaaggaaaacaccgcgcagccagtgcctttcgcaccaaataatgcgcgtccgctgacgctggaagacgatcgtttgagctgcaccgttcgcggctacaacttcgcgatcaccttcagtaaaatgagtggcaaaccgacatcctggcaggtgaatggcgaaagcctgctgactcgcgagccaaagatcaacttcttcaagccgatgatcgacaaccacaagcaggagtacgaagggctgtggcaaccgaatcatttgcagatcatgcaggaacatctgcgcgactttgccgtagaacagagcgatggtgaagtgctgatcatcagccgcacagttattgccccgccggtgtttgacttcgggatgcgctgcacctacatctggcgcatcgctgccgatggccaggttaacgtggcgctttccggcgagcgttacggcgactatccgcacatcattccgtgcatcggtttcaccatgggaattaacggcgaatacgatcaggtggcgtattacggtcgtggaccgggcgaaaactacgccgacagccagcaggctaacatcatcgatatctggcgcagcaccgtcgatgccatgttcgagaactatcccttcccgcagaacaacggtaaccgtcagcatgtccgctggacggcactgactaaccgccacggtaacggtctgctggtggttccgcagcgcccaattaacttcagcgcctggcactatacccaggaaaacatccacgctgcccagcactgtaacgagctgcagcgcagtgatgacatcaccctgaacctcgatcaccagctgcttggcctcggctccaactcctggggcagcgaggtgctggactcctggcgcgtctggttccgtgacttcagctacggctttacgttgctgccggtttctggcggagaagctaccgcgcaaagcctggcgagctatgagttcggcgcagggttcttttccacgaatttgcacagcgagaataagcaatgaggatcatcgataacttagaacagttccgccagatttacgcctctggcaagaagtggcaacgctgcgttgaagcgattgaaaatatcgacaacattcagcctggcgtcgcccactccatcggtgacagtttgacttaccgcgtggagacagactccgcgaccgatgcgctatttaccgggcatcgacgctattttgaagtgcattactacctgcaagggcagcaaaaaattgaatatgcgccgaaagagacattacaggtagtggaatattatcgtgatgaaactgaccgtgaatatttaaaaggctgcggagaaaccgttgaggtccacgaagggcaaatcgttatttgcgatatccatgaagcgtatcggtttatctgcaataacgcggtcaaaaaagtggttctcaaagtcaccatcgaagatggttatttccataacaaataacaactacggcggcaaaaggagtttgccgccaccgctaccctactcattttcggagatgtgttatgtctgataccaaacgtaatacaatcggcaaattcggcttgctcagcctgacttttgccgccgtttacagctttaacaacgttatcaataataatattgagcttggactggccagcgcaccgatgtttttcctcgcgacgattttttattttattcccttctgtctgatcatcgcagaatttgttagcttaaataaaaacagtgaagccggtgtctacgcgtgggtaaaaagtagcctgggcggacgttgggcatttattactgcctatacctactggttcgtaaacctgttctttttcaccagtctgttgccgcgcgttattgcttatgctagctatgccttcctcggatacgaatatattatgacgccggttgccaccaccattatcagtatggtgctgttcgccttctccacctgggtttccaccaacggggcgaaaatgttggggccaattacctccgtcactagtacgctgatgctgctgttaacgctctcctacattttactggcaggtacggcgctggttggcggcgtacagcctgctgacgccatcaccgttgacgcgatgatcccgaacttcaactgggcgttcctcggcgttaccacctggatctttatggccgcaggtggcgcggagtccgtcgctgtgtacgttaacgacgtcaaaggcggtagcaaaagcttcgttaaagtgatcatcctcgccgggatttttatcggcgtactgtattccgtctccagcgtgctgattaacgtcttcgtcagcagcaaagagttgaaatttaccggcggaagcgtgcaggtattccacggcatggcggcgtattttggtctaccggaagcgttgatgaatcgctttgtcggtctggtgtcctttaccgcgatgttcggttccctgctgatgtggaccgcaacgccggtgaaaattttcttctccgaaatcccggaaggcatctttggtaagaaaaccgtcgaactgaacgaaaacggcgttccggcgcgcgcagcgtggatccagttcctgatcgtcatcccgctgatgattatcccgatgctcggttccaataccgtgcaggatctgatgaatactattattaatatgaccgccgcagcgtccatgcttccgccgttattcatcatgctggcttacctgaatttacgcgccaaattagatcacctgccacgcgatttccgtatgggctcccgccgcaccggtattatcgttgttagtatgctgattgcgatatttgccgtagggtttgtcgctagcacattcccgactggcgcgaatattctgaccatcattttttataacgtcggcggtattgttatcttccttggctttgcgtggtggaaatacagtaaatatataaagggattaacggctgaagagcgccatattgaagcgacgccagccagcaatgttgattaagcagaataataaaaaatgagcaggcattttccctcttcctggatgaggagagggaaaatagtttctgcctttatatttttataattacaacgataaaaggctgtactttttctttagctcatggattaacacaatgaaattaatcactgcaccatgcagagcattacttgctctgccgttttgctacgccttttctgcggcaggagaagaagcacgtccggcagaacatgacgacacaaaaacacccgcaattaccagcacatcttctcctagttttcgtttttacggcgaattaggggttggtggatatatggatttagagggtgagaataaacataaatacagcgacggtacctatattgaaggtggcctggagatgaagtacggctcctggttcggcctgatttacggcgaaggctggaccgtgcaggccgaccacgacggcaatgcctgggtgccagaccatagctggggtggtttcgagggcggaattaaccgtttctatggcggttatcgtaccaatgatggcaccgaaatcatgctcagtctgcgtcaggattccagcctggatgacctgcaatggtggggcgatttcacccccgatctgggctacgtcattcccaatacccgcgacattatgactgcgctgaaggtacagaacttaagcggcaactttcgttatagcgtcaccgcgactcctgccggacatcatgatgaaagcaaagcctggctacattttggcaaatacgatcgctatgacgacaaatacacctatccggcaatgatgaacggttacatccagtatgaccttgccgaaggcatcacctggatgaacggtctggaaatcaccgacggcacaggacagctctatctcacgggcctgctaactcctaactttgccgctcgcgcctggcaccataccggacgcgccgacgggctggacgtaccgggaagtgaaagtgggatgatggtgagcgccatgtatgaagcgttaaagggcgtttatctctccaccgcttacacctacgccaaacatcgccctgaccacgctgacgatgaaaccacctctttcatgcagtttggtatctggtacgaatacggcggcggacgtttcgccacggcttttgatagccgcttctacatgaaaaatgcctctcacgatcccagcgaccaaatcttcctgatgcaatatttctactggtaataaggactgtaatttcatgaaaataaaaactattttaacgccagtaacctgcgctctgctgataagtttttccgcccatgccgctaacgccgacaattataaaaacgtgattaaccgtactggcgcgccgcagtacatgaaggattacgattacgacgatcaccagcgttttaatccgtttttcgatctcggagcctggcatggtcatctgttgccagacggccctaacaccatgggcggctttccgggcgttgcgctgctgacggaagagtacatcaactttatggccagcaatttcgaccgcctgaccgtctggcaggacggcaagaaagtcgactttacgctggaggcatacagtattcccggtgcgctggtgcaaaaactgacagcaaaagatgtgcaagtcgaaatgactctgcgcttcgccacgccgcgcacgagtctactggaaaccaaaatcaccagcaataaaccgctggatctggtgtgggacggcgaactgctggaaaaactggaagcgaaagaagggaaaccgctttccgataaaaccattgctggcgaataccctgactatcagcgcaaaatcagcgccacccgtgatggcctgaaagtcacctttggcaaagtgcgcgccacctgggatctgctgacctccggcgaaagcgaatatcaggtgcataaatccctgccggtgcagactgaaatcaacggtaatcgctttaccagtaaggcgcatatcaacggtagcaccacgctctacaccacctattcccatctgctgaccgctcaggaagttagcaaagagcaaatgcagatccgcgatattctggcgcgtccggcgttttatctcaccgccagccagcaacgctgggaagaatacctgaagaaagggttaaccaatccggatgcgacgccggaacagacgcgcgtcgcggtgaaagcgatcgaaacgctcaacggtaactggcgcagtccgggcggtgcggtgaaatttaacaccgttacaccgagcgtgaccgggcgctggttctccggcaatcagacctggccgtgggatacctggaagcaggcgtttgcgatggcgcatttcaatccggacatcgccaaagagaatatccgcgcggtcttctcctggcagatccagcctggcgatagcgtgcgtccgcaggatgtgggctttgtccccgacctgatagcgtggaaccttagccccgagcgtggtggcgatggcggcaactggaacgaacgtaataccaaacccagccttgccgcctggagcgtgatggaagtgtataacgtcacccaagataaaacctgggtggcagagatgtacccgaaactggtggcctatcacgactggtggttacgtaaccgcgatcacaacggcaacggcgtgccggaatatggcgcgacccgcgacaaagcccacaacactgagagcggcgagatgctgtttacggtgaaaaaaggcgataaagaagagacgcagtctgggctgaacaactacgcccgcgtggtggagaaaggccagtacgacagtctggaaattccggcacaggttgctgcaagctgggaaagcgggcgtgatgatgccgccgtctttgggtttatcgacaaagaacagttggataaatatgtcgctaatggcggcaaacgtagcgactggacggtgaaattcgccgaaaaccgcagtcaggacggaacgttgctgggctacagcctattgcaggagagcgtggatcaggccagctatatgtacagcgataaccattatctggcggagatggcaaccatcctcggtaagccagaagaggccaaacgctatcgccagttggcacagcagctcgcggactacatcaacacctgtatgttcgacccgactacccagttctactatgacgtacgtattgaagataaaccactggcgaacggctgcgcgggcaaaccgattgttgagcgcggtaaagggccggaaggctggagcccgctgtttaacggtgcggcaacgcaggccaatgccgacgcggtggtgaaggtgatgctcgatcctaaagagttcaacacctttgtcccgctgggaacggcggcgttaaccaatccggcttttggcgctgatatctactggcgtgggcgcgtatgggtggatcagttctggtttggtctgaaagggatggagcgttacggttatcgtgatgatgccctgaagctggcggatacgttcttccggcacgccaaagggttaaccgccgatggaccaattcaggaaaattacaacccgctgacaggcgcacagcaaggcgcaccaaatttctcctggagtgccgcgcatttgtatatgttgtataacgattttttccgtaagcaataatttgcaactgctggcggatgcggcgtaaacgccttatccgccctacatgtgcaatcctcctggccggataaaacgcggcaagcgttgcatccggcaactgcaccgcgccactggcggatgcggcgtgaacgccttatccgccctacatgtgtgttcccgtaggtcggataagacgcgacaagcgtcgcatccggcatctgcaccgcgccactggcggatgcggcgtggacgccttatccgccctacatgtgcaattccgtaacctggataaaacgcgacaagcgtcgcatccggcgttatcaccgggcgtattctttttgaatcccatcacaaaccccgcactccccttttcccttttctccggcgacggctaaattagaactcatccgaccacataacaattattttacatactggacaattttatgagctacccgagcctgttcgccccgctggatttaggttttaccacgttaaaaaaccgcgtgttgatgggcagtatgcacaccgggctggaggaatacccggacggtgccgagcggctggcagcgttttatgccgaacgcgcccgtcacggcgtggcgctgattgtcagcggcggcattgcaccagatttaacaggcgttggcatggaaggtggcgcaatgctcaacgacgccagccagatcccacaccatcgcaccattaccgaagcggtacatcaggaaggcggcaaaatagccctgcaaattttgcataccgggcgctacagctaccaaccgcatctggtcgccccgtccgcattgcaggcccccatcaaccgtttcgtgccccatgagttaagccatgaagagatcctgcaactgatcgacaatttcgcccgctgcgcgcaactggcgcgggaggcaggatacgacggtgtagaggtgatgggttccgaagggtatttgatcaacgaatttctgacgctgcgcaccaatcagcgtagtgaccagtggggcggcgattaccgcaaccggatgcgatttgccgtagaagtagtgcgtgcggtgcgcgaacgcgtcggcaacgacttcattattatctaccgactgagcatgctcgacctggtcgaagacggcgggacttttgccgaaacggtagagctggcgcaggccattgaagcggcgggcgcgaccattatcaacaccggcattggctggcatgaagcacgtattccgaccattgccacgcccgtgccgcgcggcgcatttagctgggtcacgcgcaaactgaaaggccacgtcagcctgccgctggtaaccaccaaccggattaacgatccgcaggttgccgacgatattctcagccgcggcgatgccgatatggtaagcatggcgcgaccgtttcttgctgatgcggagctgctgagtaaagcgcaaagcggacgagccgatgagatcaacacttgtattggctgcaatcaggcctgtctcgatcaaatcttcgttggcaaagtcaccagctgcctggtgaatcctcgcgcctgccacgaaaccaaaatgccaatccttcccgccgtgcagaaaaaaaatctggcggtggtcggtgcgggacctgctgggctggcgtttgccattaacgcggcggcgcgtgggcatcaggtaacattgtttgacgctcatagcgagattggcgggcagtttaatatcgccaaacagatccccggcaaagaggagttttacgaaacgctgcgctattaccgccggatgatcgaagtgacgggcgtgacgctaaaactcaatcacaccgtgacggcggatcagttacaggctttcgatgaaacgatcctcgccagtgggatcgtgccgcgcactccgcccatcgacgggatcgatcatccgaaggtattgagttatctcgatgtactgcgcgacaaagcgccggttggcaacaaagttgccatcatcggttgtggcgggattggttttgatacggcgatgtatttaagtcagccgggcgaatccaccagccagaatatcgccgggttctgtaatgaatgggggatcgacagtagcctacaacaggctggtggcttaagcccgcagggaatgcagatcccccgtagcccacggcagattgtgatgctccagcgcaaagccagcaaaccaggacaggggttaggcaaaaccaccggctggatccatcgcaccaccctgctcagccggggtgtgaaaatgatcccaggcgtaagttatcagaagattgacgatgacgggctgcatgtggtgatcaacggcgaaacgcaggtattagcagtggacaatgtggtgatctgcgcagggcaagagccaaaccgcgcgctggcgcaaccgctgattgatagcgggaaaacggtgcatttaattggcggctgcgatgtggctatggagctggacgcacgacgggcaattgcccagggaacacggctggcgctggagatttaaatcgttatttgaagcgccggatgcaacgcatccggcacgtcgcgttaatcaataaacaaggcgggagaaatgccgaatcgcgttgccaattttttagcgtgttccagcgttaatttcctcttcccgctcaaaacgcgactcaccatagatttactgccaatttccggcagatcggaaagggttaaaccatattgatccataagggtacgaatcacggctataccgccaggcatggcttgagccatggcattaaattccgcaaattcgggcgcactttcttcccacgcggttattttggcacacaccagatccagcaaggggttttcaggatcgttgagcagcagatgatctaccagttccagcgcctgggtgtattgttcctcgttctgaatacccgccagaaaaggtgccacagcagttagcttttctcctgcttgcaagatgtcggcaatcgcaatcattttttccccttagtacgatgaacagcggtaaagaaatcgtattctttatgcgtcataacttcacgtatgtagcacttttggctttcaaaaaagaccattgctacaacacgtaattcattgcccccaacattgaaaacataatgcttatccagatatttgaagttatccagagatgggaatactgcttttaaactctcaggttttttgaaatatcccttagcaatcgtgttccccagagccaccaactccgttttatgttgcgggtatttttccgcagcatctttcaatgctttttgagttatcaggtgcattcttcatcacgtccgttgacaaattggcaatatgataacatccgttgccagattggcaacggatgaatttatctgtgtgacggaagaataaacgtagaaaaacgctaaacaagagaatgtagacgatggtgacagggattttttgttttatggaagcgcgattccagaactgggcagacattgccggatgcgacgcttgccgcgtcttatccggcctggagtaacgtgctgaacgtaggccggataaggcgtttacgccgcatccggcaggtaactcccaatcttaccgacgacgtcccagcttcaccgctttcagtaccacaaatttattattcgtcgcaatagtggtgcagttgccgaaaatcttcttcagtttatggaagtaatccaggtgacggttggcaacgatatacagctcgccgttgattttcaggcagcggcgggcgtggtggaacatctcccaggcgacgttatcggtcagcgcatgttgttggtgaaacggcgggttgcagagcacagcattaaagcggaaaggctccacgccggagagcgcgttgttgatcataaactcgcagcgatccaacgcctctggcatgttggtttcaacgttcaaacggctggaagcaaccgccatcgggctttcatcgacaaacaccactttcgcctgcgggtttttatcaagcagcgtcagaccaataacgccattaccgcaaccgagatcgacaatctccccttcgagattctctggcagatgttgcataaagaagcgcgcgccgatatcaagcccggtgcgggagaagacattcgcatggttgtggatagtccagtcagtaccttccagcttccagctaacggtctgcggcgcatcggccagctgcggttcattgaaagtgcaattaatcaggcgcgcttttttccatgccagcgtggtggtggttgggccgagcactttttcgaacagttccagcgtggaagtgtgaatgtcacgggccttggcaccggcaataatacgtgtatcgctcgtgaccactttgcgcagcgcacgcagttgctgttccagcaatgccagtgttttcggcactttgatcagcaccacacccggctgttgcgggtagtcggcggtgctgtcgagaaacttcacgctgctctcatcaatcccgttgaggcgtaaattctcgcgcgtcgccagttcactgatgtaactgtcgccaatgctgtacggcttatgttccgccagtgcgcagcttaacgcaccaaaggcatcattcaggatcaacaccgggccgcggatttctgtgtcgtccaactgttgcagcaaatattcatccgccgcttcccacgcctgtagcgggttaacgtcatccgtcgccggaaaacgttgtagtgtcagactacggaaaccgttgtctaagtggctcatcggccctcctgaatgataaaatttcgacattgcccctgaaaagggtgcgtgagtataccctttttctctttttcgtgggcggttatgagcaatcttacttatcttcagggttatcccgagcagctactttcccaggtgcgaacactgattaacgaacagcgtctgggcgatgtgctggcaaaacgctatccgggaacacacgactacgccaccgataaagccctctggcaatatactcaggatctgaaaaatcagtttctgcgtaatgccccgccgatcaataaagtgatgtatgacaataagatccatgtgctaaaaaacgcgctcgggttacataccgctgtttctcgtgtgcagggcggcaagctgaaagcaaaggtggagatccgcgtcgctaccgtgtttcgcaacgcgccggaaccgtttttgcgcatgatcgtggtgcacgagctggcgcacctgaaggagaaagagcataacaaagcgttttaccagttgtgttgtcatatggaaccccagtaccaccagcttgagttcgacacccgactgtggctaacgcagttgagccttgggcagaacaaaatctgaaaatgatgtcaggcgttatcttttctttctttagcgcctaaaatcgacctcccccctttcgttaaggataacgaccatgctgcgcgcatttgcccgccttcttctccgtatttgtttttctcgccggactctaaagattgcctgcttactgttacttgtggcaggagcgaccatccttatcgccgatcgcgtaatggtcaacgccagcaaacagctgacctggagcgatgtcaacgccgttccggcgcgtaacgtgggtttattgctgggggcgaggccgggtaatcgctactttacccgacgtattgataccgcagcagcgttgtaccacgccggaaaagtgaaatggctgctggtaagtggcgataacggacgtaaaaattacgatgaagcaagtggtatgcagcaggctttgatcgctaaaggcgtaccagcaaaagtgatcttctgcgactatgccggattcagtacgctggatagcgtagtgcgtgccaaaaaggtttttggtgaaaaccatatcaccattatcagccaagaatttcataatcaacgcgccatctggctggcaaaacagtacggcatcgacgctatcggttttaacgcgccagacctcaatatgaagcacggtttttatactcaactgcgggagaaactcgctcgtgtcagcgccgtgattgacgccaaaatcctccatcgccagccgaaatatctcgggcctagcgtcatgattgggccgtttagtgagcatggctgtccggcgcagaaataatgcgtatctgcgcacgtcgaagatgaaaaaggcgtgctacattgacgacagaatccctttatggagtatccacgcgttatgatacgtttcgctgtgattggtacgaactggatcactcgccagttcgtcgaggccgcccatgagagcggtaaatacaagttaaccgccgtatattcccgcagccttgaacaggcccagcacttcgccaatgatttttctgtcgagcatctgtttaccagcctggaagcgatggcggaaagcgatgccattgacgcggtgtatattgccagcccgaattccctgcatttttcccagacacaacttttccttagccataaaattaatgtgatttgcgagaaaccgctggcgagcaatctggcggaagtggatgccgccattgcctgtgcgcgggaaaatcaggtggtgctgtttgaggcatttaaaaccgcctgcctgccgaactttcatttgttgcgccaggcgctgccgaaagtcggcaaactgcggaaagtctttttcaactattgccagtattccagccggtatcaacgttacctggatggtgagaatcccaacacctttaatccggcattctctaacggtagtattatggatatcggtttttactgtctggcgagcgcggtggcgttatttggtgagccgaaaagcgtgcaggcaaccgccagtttgctggcaagcggcgttgacgcccagggcgtggtggtgatggattacggtgatttcagcgtcaccttgcagcacagtaaagtcagtgattctgtcctggcgagcgagattcagggcgaagcaggaagcctggtgattgaaaaactgtctgaatgccagaaagtgtgcttcgtgccgcgtggcagccaaatgcaggatctcacccagccgcagcatattaataccatgctctacgaagcagagctgttcgctaccctggtggatgagcatctggtggatcatccagggctggcggtcagtcgcatcaccgccaaactgctgaccgagatccgccgccagactggggtgatttttccggcagatagcgtaaaactataattgccaaagtaaaacagtgtaaaaggtatgtaacagaccattgactggctgaatggtctgtcatactttgttacctgcaaaggggagtaacttcattgccggtcgatcgtcattacgatgtgtgaaaaaacacatccggtcaccgggcaacccgaaaggaatacgcagacgtattccttttttgttgtaagtgagaccttgccggaaggcgaggtctatgcataaaaagcagcggctgacgtcttccgacgttggccgtttttttatgtgtaaggaacttctatgaatactgtcggcacgccgttgctatggggcggattcgctgttgttgtcgccattatgctggctatcgacctgttgttgcaggggcgtcgtggggcacatgccatgaccatgaaacaggctgcggcctggagcctggtctgggtgacgctgagcttactgtttaacgccgctttctggtggtatctggtgcaaaccgaaggtcgcgccgttgccgatccacaggcactggcctttctcacaggttatctgattgagaaaagcctggcggtcgataacgtctttgtctggctgatgttgttcagctatttctctgttccggcggcattacaacgccgcgtgctggtgtatggcgtgctcggggcgattgttctgcgtaccatcatgatcttcactggcagctggctaattagccagttcgactggatcctgtatatcttcggtgccttcctgctgtttaccggcgtgaagatggcgctcgcccatgaagatgaaagtggcattggcgacaagccgctggtgcgctggctacgcggtcatttgcgcatgaccgacaccatcgacaacgagcatttctttgtgcgtaagaatggattgctgtacgccacaccgctgatgctggtactgattctggtggaattgagcgacgtgattttcgccgtggatagcattccggctatcttcgccgtgaccactgacccgttcattgtgctgaccagtaacctgtttgcgatcctcggcctgcgtgcgatgtatttcctgctggcgggcgtagcagagcgtttcagcatgctcaaatatggcctggcggtgattctggtgtttatcggtatcaagatgctgattgtcgacttctaccatattccaatcgccgtcagcctgggcgtggtgtttggcattctggtgatgacgtttattatcaacgcctgggtgaattatcggcatgataagcagcggggtggataatttttaatctgcctaagccgtgtaccctgtcattaacatgagcaccgttttctccctctcccttccagggagagggtcggggtgagggtaatttttcgcaccgatgctggcctgttcccctcaccctaaccctctccccaaacggggcgaggggactgaccgagtccttttttgatgttgtcatcagtctggaagccgcacgttggctttatttttatgtcaaagaaatgtaaccattaagtttcaaaatatgacctctctttaaaatccagcatttttcgcttcccgaagctgtaactttccttatactcgaccttgcaaacactttgttacatcctgaaagatgcgtcgacagaacgcaccagggatgtgcgacaacacaatgaaaggatcgaaaaatgactacgcaacgtagtccggggctattccggcgtctggctcatggcagcctggtaaaacaaatcctggtcggccttgttctggggattcttctggcatggatcagtaaacccgcggcggaagctgttggtctgttaggtactttgttcgtcggcgcactgaaagccgttgcccccatcctggtgttgatgctggtgatggcatctattgctaaccaccagcacgggcagaaaaccaatatccgccctattttgttcctctatctactgggcaccttctctgctgctctggccgcagtagtcttcagctttgccttcccttctaccctgcatttatccagtagcgcgggtgatattagcccgccgagtggcattgtcgaagtgatgcgcgggctggtaatgagcatggtttccaaccccatcgacgcgctgctgaaaggtaactacatcgggattctggtgtgggcgatcggcctcggcttcgcactgcgtcacggtaacgagaccaccaaaaacctggttaacgatatgagcaatgccgttacctttatggtgaaactggtcattcgcttcgcaccgattggtatttttgggctggtttcttctaccctggcaaccaccggtttctccacactgtggggctacgcgcaactgctggtcgtgctggttggctgtatgttactggtggcgctggtggttaacccattgctggtgtggtggaaaattcgtcgtaacccgttcccgctggtgctgctgtgcctgcgcgaaagcggtgtgtatgccttcttcacccgcagctctgcagcgaacattccggtgaatatggcgctgtgtgaaaagctgaatctggatcgcgatacctattccgtttctattccgctgggagccaccatcaatatggcgggcgcagcaatcactattaccgtgttgacgctggctgcggttaatacgctgggtattccggtcgatctgcccacggcgctgctgttgagcgtggtggcttctctgtgtgcctgtggcgcatccggcgtggcgggggggtctctgctgctgatcccactggcctgtaatatgttcggtattagcaacgatatcgccatgcaggtggttgccgtcggctttatcatcggcgtattgcaggactcttgcgaaaccgcgctgaactctagtactgacgtgctgttcactgcggcagcttgccaggcagaagacgatcgtctggcaaatagcgccctgcgtaattaattgtttaacccctttcgtctacggcggaaggggttttctcaactttaaacggatcaattccccttttctgcatccgccagaaacgaatgatattcaggccattcataagcagaaaactaccctcaatcatcgtgccgcctatgctccccgcccagaagttgtgaatcacccagcaacacgtactaaaccacattacgcagcgcatggtcagccctttacagcagaatagcgcccaggtactgacaatcgtgccgataaccggcaatagttcgacaggatgatggaacttcgcgaggccaattccgccagtcagcacaataaaaatcgccattacccataagctgcgcgtgcgtaaggtaatcaatgtacgaatggcattaaggatggcactggcaccagcgggataggtgcccagaagaaaaaaatgtacgccaataacggcgctatagacgctaagctgctttttgaagcgacgttcgtcacgattgaaaaatgttgtgataccaatcagaaaggcgatgacacccacgccctgggccagccaatacgcggtcatgataaatccttagcaggtatggaaaagcaaacggcgcttcacattatgaaacgccgttttttattaacaactcatttcgactttatagcgttacgccgcttttgaagatcgccagttcgcggaagtcgttacgctcgttacaggtttgcttaccgttggcaaactcaacgatggtgtcgataaattcttccagcaactgcggcatcgctttaccgtggatcaactgacccgcgtcaaagtcgatccagtgttttttcttcgccgccagttcactgttggtggcgattttcaccgtcggcacaaatccaccatacggcgtgccacgaccagtactgaacagcaccatatggcagcccgcacccgccagggcgctggtcgctacggcatcgttacccggcgcacttaacaagttcagccctggcgttttcagacgctcgccgtaacgcagcacgtcaaccacgacgctggaacccgctttctgggtacagccaagacttttgtcttccagcgtggtgataccgcccgctttgttccccgggcttgggttttcatagatcggctgatcatgggcaataaagtactgtttgaagtcgttgaccatggtgaccagtttttcaaacgttgcttcgtcgcggcaatggtccatcagcaactgctctgcgccaaacatctccggcacttcggtcagtacggtagtaccgccgttagcaatcacgtagtcagagaaacgccccagcatcgggttagcagtaataccagaaagaccgtcagaaccaccgcactccagaccaaacttcagttcgctgagtttgcctggctcgcgtttatcgttgcgcatcacgttatacagctgatgcaaatgctcgattccggcttcgatctcatcatcctgctgttggcagatcatgaaatgaacgcgttcaggatcgatatcgcccagcgtttcacggaatgcggcaacctggttgttttcacagcccagaccaatcaccagcactgcgcctgcgttcgggtggcgcaccatgttttgcagcatggtgcgggtattaatgtgatcgtcgcccagctgactgcagccgtaggtgtggctgaagaggaacacgccgtcagtaccttcggcgttgttggtctctttcagaaaacggttctggatctgccgcgcgatgccgttgacacagcccacggttggcaggatccacagctcattacgcaccccgacatcgccgttagcgcgacgatagatctgcacttcacgatctgccgcttgcgcaggcagatcctgaaaatcaggttgatagcgatactgatccagatcgctcagattcgtgcgcgtattgtgggcgtgaacgtgaacacctgccgcaatatccgccaatgcataaccaatcggcaggccatatttgatgacattggccccttttgcgatatccgttaacgcaaatttatgtccacgagcaacatcctggcgcagcgtaacagtctggttatcgacactgacttctgtgccttcagccaaatctgctaaagcgaccgcgacgttatccagcgcatggatcttgatgtattgcatatcaaccccagaccttagttcagttcaatggcgaagtagtcacgcgcattgttaaagcaaatatttttcaccatctcgcccagcaggttgatgtccgccggtgcttcgcccgcttccacccagcgaccgatcatctggcacagaatgcggcggaagtattcgtgacgggtgtaactcaggaagctacggctgtcagtcagcataccgacaaagcggctcagcagaccgagctgcgccagttgggtcatctgacgttccataccgtctttctgatcgttaaaccaccagccggaaccgaactgcattttgcccggcataccttcgccctggaagttaccgatcatggtgcccagcacttcgttatcgcgcgggttcaggcagtacagaatggttttcggcagcaggttttcttcattctgcttgctcagcaacttagacagctcttccgccatcggacggtcgttgatggagtcaaagcctacatccggccccagcagtttgaactgacgcaggttgttattacgcagcgcgccaatgtggtactgctgtacccagccgcgacgtgcatattcggcaccaaggaacaccagtaccgcagttttgaactgcgccacttcgtgctcgctcagggtttcgccagccagacggcgcgccagaatgctgtccagttccgcttcgttcgcttcagcaaacatcaccacatccagcgcgtggtcagacactttacagccgtgagcggcgaagtgatccagacgtttggtcagggcagtttgcaggtcagcaaagcggcgaatgtcggtatcggaaacttcgcccagcttcgccatgtagtcgttaaaggtcgcctgttcgatgttgaaggctttgtccggacgccagctcggcagcactttgatggtgaaagagccgtctttggcgatctctgcgtgatgctccagagaatcgatcgggtcatcggtggtgccgaccattttcacgttcatctgctgcatgatgccgcgcgcggagaagttatcctgcgccagcagttcgttacattcgttccagatttcatcggcagtactcggagaaagcaatttgccagtgataccaaacggacggcgcagttcgaggtgcgtccagtggtataacgggttgccgatagtgtgcggaacagtcgccgcccaggcgtcaaatttttcacggtcagacgcatcaccggtacacagacgctcggccacaccgttggtacgcatagcgcgccatttgtagtgatcgcctttcagccagatgtcatacaggtttttaaaacgatagtcttccgcaatctgctgcggcggcaaatggcaatggtaatcgaaaatcggctggtcttttgcgtagtcgtgatacagacggcgggcaaattcggtatctaacaggaaatcttcagtcataaacggagtcattttcgtcttcctctcaacgagtgagctagcttgcttatggtgcgatgctgacaaagttatcacaccaatttccagagtccgaagatattttcgtgagttagatcaataaacgtagttaaaaaaattactctcaaagtggtaaatctcgctgcaggccgcgccagtactggccttgctgtcgtcaggtaatgtccctacaaatattcccacatttgtgatggctctcaccttttaaagttgtatgacaagttatctttctgccgtcgcaaatcataagtcgacggaatgcaaattgccgattcattcatttgttagatgaatcgggttaaccggtacggaagccgaattagcacgaaactttcatggcaacgttcggggcgtgccggttttttttcggttacccggtcgtaactaacatcttcagcctctggcgggatgatggccgcgcttcctgcggatataacaaaacgatgaggttttacatgcgtaaaattaaagggttacgttggtatatgatcgcactggtgacgctcggcaccgtgcttggttacctgacgcgtaacactgtggcggcagctgcgccaactctgatggaagagttaaacatctccacccaacagtattcctatatcatcgcagcctattctgctgcttatacggtcatgcaaccggtagcaggttatgtactggatgtgctgggtacgaaaatcggttatgcaatgtttgctgtgctgtgggccgtgttctgtggtgcaaccgcgctggcaggtagctggggtggcctggctgttgctcgtggtgcggtcggtgccgcggaagcagcgatgatcccggcgggtctgaaagccagctccgaatggttcccggcgaaagagcgttccatcgcagtaggctactttaacgtaggttctagcattggtgcgatgattgcgccgccgctggtggtatgggcaatcgtaatgcacagctggcagatggcatttatcatctccggtgcattgagctttatctgggcgatggcatggctgattttctataaacatccgcgcgaccagaagcatctgaccgatgaagaacgcgactatattattaatggtcaggaagcccagcaccaggtgagcacggcgaagaaaatgtccgttggtcagatcctgcgtaaccgtcagttctggggtatcgcgctgccgcgtttcctggcagaaccggcctggggtacttttaacgcgtggatcccgctgttcatgtttaaagtttacggctttaacctgaaagagatcgcgatgttcgcctggatgccgatgctgtttgctgacctcggttgtatcctcggtggttacctgccgccgctgttccagcgttggtttggtgtgaacctgatcgtttcccgtaagatggtcgtaacgctgggtgcagtgctgatgattggcccgggtatgatcggcctgttcaccaacccgtatgtcgcaattatgctgctgtgtatcggtggttttgcccaccaggcactgtctggcgcgctgattacgctctcttccgatgtgtttggtcgtaacgaagtggcaacggcaaacggtttaaccgggatgtccgcatggctggcaagtacgctgtttgcgctggttgtcggtgcactggctgacaccatcggcttcagcccgctgttcgcagttctggcagtgttcgacctgttaggtgcgctggttatctggaccgtgttgcagaacaaaccggcgattgaggtggcgcaggaaacacataacgatcccgcaccgcaacattaacgtttcgtgtaagttttagtttcccttcaaagccgccttctcaggcggctttttcatcactgcgagtagagctaaactcgcaaaagtggtataacaaatatagtctgccgtatcatgcctggagcgcatatggaaatcactgaaccacgccgtttgtatcaacaacttgccgctgacctgaaagagcgcatcgaacagggcgtctatctggtgggtgataaactgcctgcagaacgctttattgccgatgaaaagaacgtcagccgtacggtagttcgtgaagccatcatcatgctggaagttgaaggctatgtcgaagtgcgtaaaggtagtggtattcatgtggtttccaaccagccgcgccatcagcaggcggctgacaataatatggaattcgccaattacggtccgtttgagttgcttcaggctcgccagctcatcgaaagtaatattgccgaattcgcggcaactcaggtaacgaaacaggacatcatgaaactgatggccattcaggaacaggcgcgcggcgaacaatgcttccgtgattccgagtgggatttgcagttccacattcaggtcgctctggcgacgcagaactccgccctggcggctatcgtggaaaaaatgtggacccagcgtagtcataacccgtactggaaaaaactgcacgaacacattgattcccgtaccgtcgataactggtgtgatgaccacgatcaaatcctcaaggcgctgattcgcaaagatcctcatgctgctaagctggcaatgtggcagcatctggaaaacaccaagatcatgttatttaacgaaaccagcgacgacttcgagttcaatgccgaccgctatctattcgccgaaaacccggtggtgcatctcgatacagccaccagcggcagtaaatgaaattcctgtccgacaggcgctgcaatgcgcctgtttgtctcgtcggtaagcgaaaagtataaagtgtcagcctgtgtaaatcctctcgccaccctcccctgcattcagcaaaatcagactccacggacatgtaattttgataacgaacaacgttgacctttgttacaattagattcaatttgaatttatgtttttgaatgctttcttatctcacgatttaacagggaatagttcaggctgtgttgatgtatcaaacccgcagaacataccaaaacagcaataacattgcggtagtgcatcttttaaaaccagcgtggcgttaaccgattcaccaggaataatgaatggaacttttgacccaattgctgcaagccctgtgggcgcaggattttgaaaccctggccaatccaagcatgattggcatgttgtattttgtcttgtttgtaattttgttccttgaaaacggcttgcttccggcggcctttttaccgggcgacagtttactggtattggtcggcgtgttgattgcgaaaggcgcgatgggctatccgcaaacgattctgctgctgaccgttgccgccagcctcggctgctgggtcagctatattcaggggcgatggctgggcaatacccgcaccgtacaaaactggctatctcatttacccgcgcattatcatcaacgcgcacaccatctttttcataaacacggtttaagcgcgctgttaattggtcgctttattgcgtttgtcagaacactgctgccgacgattgccgggttaagtgggctgaataacgcgcgctttcagtttttcaactggatgagcggtctgctgtgggtattgatcctgacaactctgggttacatgctcggcaaaacgccggtatttttaaagtacgaggaccagctgatgagttgcctgatgctgctcccggtggtgctgctggtgtttggcctggcaggttctctggtcgtgttatggaaaaagaaatatggaaatcgggggtaagggatgcaaatacctcgcatgagccttcgccagctagcctggtccggcgctgttttacttctggtcggcacgctgttgctggcctggtccgcggttcgccagcaagagtctacgctggcgattcgtgccgttcatcaaggcacaacgatgccagacggttttagtatctggcatcaccttgacgctcatggcattcctttcaaaagtatcacccccaaaaacgacactctgttaattacatttgactccagcgaccagagcgccgccgcaaaagcggtcctcgacagaacattgccccatggctacatcattgcgcagcaggacaataacagtcaggctatgcagtggctgacccggttacgggataactctcatcgcttcggataacttcctgttatccgaaacatatcactcactttggtgatttcaccgtaactgtctatgattaatgaggcggtggttaacactaccgcttcgttgtctggacaatcgttcctttgtaataggtccgaatcacaatggaaggttcaagaatgaaataccgcatcgctttagctgtttctctctttgctcttagtgccggtagttatgccactaccctgtgtcaggaaaaggagcaaaatatccttaaggagatcagctatgccgaaaaacaccaaaaccagaatcgtattgacggtctgaataaagccctgagtgaagtccgggccaactgtagtgatagccagctgcgtgccgatcatcagaagaaaatcgcaaagcagaaagatgaggtggcggaacgccagcaagatttagccgaggcgaagcaaaaaggcgatgccgataagattgccaaacgcgaacggaaactggcagaagcgcaggaagagctgaaaaagctggaagcgcgcgactactaactcacaatagtcactacttactcacctggagaaaactatgagcaaagaacacactacggaacatctgcgtgctgagttgaaatccctttccgatacgctggaagaggtgcttagcagttctggcgagaagagcaaagaagagttgagtaagattcgtagcaaagcggagcaggcactgaaacagagccgttatcgcctgggtgaaaccggtgatgccattgccaaacaaacccgtgtcgcggcggcgcgtgccgatgagtatgtgcgcgaaaatccgtggacgggcgtgggcattggcgctgcaatcggtgtagtgctcggcgttctgctgagccgtcgttaattatggcggacactcatcacgcacaagggcccggtaaaagcgttctgggcatcgggcagcgaattgtttctatcatggttgaaatggtagagacacgtctgcggctggcggtggtggagctggaagaggaaaaagcgaatctctttcaacttttactgatgctgggcctgacgatgcttttcgctgcatttggtcttatgagcctgatggtgctaattatttgggcggttgacccgcaatatcgcctgaatgcgatgattgccaccaccgtggtgttgctgctactggcactgattggcggtatctggacgctacgtaaaagccgtaagtctacgttgctgcgccatacacgccatgagttagcaaacgatcggcagctgctcgaggaggagtcccgtgagcagtaaagtcgaacgtgaacgacgtaaggcgcaactgcttagccagatccagcaacaacggctggatctttccgccagtcgtcgtgaatggctggagacaacaggcgcttacgatcgtcgctggaatatgctgctaagtctgcgctcctgggcgctggttggcagtagcgtgatggcgatctggacgattcgccatcctaatatgctggtccgctgggccagacgcggttttggcgtatggagcgcctggcgtctggttaaaacgaccctcaagcagcaacagcttcgcggttaacttccctctggccggagccattccggccttatccctcaaattttttgaagatttttgacagttttccttgctaacaatcatcattcaccacgtttatgattctctccatcgacagcaacgacgctaataccgcgccattgcacaaaaaaacaatcagcagcctgagtggcgcagtggagagtatgatgaaaaaattagaagatgttggtgtactggtagcgcgcattttaatgccgattctgtttattaccgctggctggggaaaaattactggctacgcgggtacccaacaatatatggaagcaatgggcgtcccgggttttatgctgccactggtgattctgcttgagtttggtggtggtctggcaatcctgttcggtttcctgactcgcaccacagccctgtttactgcgggctttacgctgctgacggcatttttatttcacagcaactttgctgaaggcgtcaacagcctgatgttcatgaaaaacctgacaatttctggcggattcctgctgctggcaattaccggtccgggcgcgtatagcatcgaccgcctgctgaataaaaagtggtaagcacgcgctatacttaacgataaaaaacgaggaggaagctcctcgtttttgctattggaggagagaaaaatgggtcaactgattgacggcgtctggcatgacacctggtacgataccaaatctaccggcggtaaatttcaacgtagtgcttccgcatttcgtaactggctcactgccgatggcgctcctggccccactggcacaggcggttttatcgcagagaaagatcgttatcatctctatgttagtctcgcctgcccgtgggcgcaccgcacgctgatcatgcgcaaactcaaaggactggaaccgtttatttccgtttccgtagtgaacccgctgatgctggaaaacggttggacctttgatgacagttttccgggagcaaccggagacacgctctatcaaaatgaatttctgtatcagctttatctccacgccgatccacactacagcggacgagttactgttcccgtgctgtgggacaaaaagaaccacaccatcgtcagcaacgaaagtgcagaaatcatccgcatgttcaataccgcgtttgatgcgctgggcgcgaaagcgggtgattactaccctccagccctgcaaacaaaaattgacgaacttaacggctggatttatgacaccgttaacaacggcgtgtataaagctggttttgccaccagccaggaagcttacgacgaggcggtggcgaaagtgtttgaaagcctggcacgactggagcagattttaggccagcatcgttacctgaccggcaaccagctaaccgaagccgatattcgcctgtggactacgctggtgcgttttgatccggtgtatgtgacccacttcaagtgtgataagcaccgcatcagcgattacctgaatctgtacggttttctgcgcgatatctaccagatgccggggatcgccgaaacagtcaatttcgatcatatccgtaatcattacttccgcagccataagaccatcaaccctacggggattattagtattggtccgtggcaggatctcgatgaaccgcatggacgagatgttcgcttcggttaaaaaaaggcaccttacgaggtgcctctgataattagctaagtgcatgttgttcatgtcggatgtggcatgaacgccttatctgacatacaaaacattgtacattcaatagattgcataacccgcgcagaccagataagcgtagcgcatctggcgattttgcgcttgtcatcagtcttagcgcgccttcacggcactttattaattccttgaacgaatatttactgccatttcattcacgtctattcttaatttgctgctttaaaaacaagtgattgagcaaaattgaggcaaaaatggactggtatctgaaagtactaaaaaattatgtcggtttccggggtcgtgcgcggcgcaaagagtactggatgtttattctggtcaacatcatctttacgttcgtgctggggctgctggataaaatgttaggctggcaacgcgctggtggcgaaggcatcctgacgacaatctacggtattctggtgtttttaccgtggtgggcggttcagttccgccgcctgcacgacaccgaccgcagcgcgtggtgggcactgctattcttaatcccgtttatcggctggcttattatcatcgtctttaactgccaggcgggtacgccaggcgaaaaccgctttggaccagatccaaaactggaaccttaaaacaaatctgctcgccggatgtctgactcatccggcttttatcattatgttgatgaatgaataatttactaatgtttatttaaaatatttcaatgtcgttatataaattacctataaaaaataaccatgtatttatcttaaatatcaaaacctttataacatccgaaaaagaaagatacgaatagcatttacacaatacccggaatagactttcgtcacttttaattaaagggatgtttttatgcagtggtatttgtccgtattaaaaaattatgttggtttctctggtcgcgcacgtcgtaaagagtactggatgtttactctgattaacgccatcgtcggcgctattatcaatgtcattcaattgattttaggtctggagcttccatatctgtctatgctttatttgctggcaaccttccttcccgtccttgcgcttgctatccgtcgcttacacgataccgaccgtagtggtgcctgggccttgctcttttttgttccgtttattggctggctcgtgcttctggtttttttctgcacagaaggtacttctggcagcaatcgttacggaaacgatccgaagtttggtagtaattaatcttagaattggggcgatatttcgcccctttttattaacaataataaatattattttccgttaaaaagtttgggaatttcccgcagacaccaggatttcgcttcccccatactgtcacgacgccaggccataataatatcgatctcgctggtgctttccgggctgacgacacgcaaccgcccttccgcaatatctttttcgaccataggatacggcatcgtcgccacgccaagccccgccagtaatgcctgacgtttatcttcaatcgtgctcaccgttaagcgcggctgtttgtccagcagctgtacggtcaacaccgggcgctcacgagcggtatccgccaccgcaattccacgatatttcacacgcgtcacttcagataacggttccggctcctgatgaatcgggtgatcaggcgcggcaacgtagacgttcattaacgtatagagcttgcggctgttgatctcgctgctggaacgaaaatgcatatccggcgcgataacaatatccgcccgcccctgctccagccgttcccacgcccccgccagcacttctgtgatgattgccagttgggtattggcttttgccgccagtttgtcgattaacgggaaaaaggcaggtgtcggtaccagcgcttcggtcacaatggtgagatgcgtttcccaaccgcgcgcgagagcttccgcatcagtagtcagtttatctgcggcttccagcaaaacgcgccctcgctccaacaacatcctcccgacattggtgaatttggtacgatggccgctgcggtcaaacagcaccacatccagctcttcttccagtttttgcatggtgtagctaagtgcggaaggcacgcgtcccagctcatccgccgccgccgcaaaactgccccggcgatcgatcgcatccataacccgtagtgcttccagcgttaatgccctttctttggccatttcgttctcattcaggaaatttgaacataccgggcagaatatctggctaacaatgtagcgtccagccccttaccataaaaggaagtaaagagaggtcaagaattatgattactacccgaactgccaggcagtgtggacaagcagactacggatggttgcaggcccggtatactttttcctttggacactacttcgacccgaaattgttaggctatgcctccctgcgtgtgcttaaccaggaagtgctggccccaggtgccgcctttcagccgcgaacctatcccaaagtcgatattttaaatgtgattctggatggagaagcagagtatcgcgatagcgaaggcaatcatgttcaggccagcgccggagaggcgttgctgctctctacccagccgggtgtcagctatagcgaacacaatctcagcaaagacaaaccgttaacgcgaatgcagctttggctggacgcctgcccgcagcgagagaatccgctgattcaaaagctggcgcttaatatgggcaagcagcaattaatcgccagcccagagggtgcgatgggaagcctgcaattacgccagcaagtgtggctgcaccatatcgtgctcgacaaaggcgaaagtgcgaatttccagttgcatgggccacgcgcgtatttgcaaagcattcacgggaaatttcatgcgcttacgcatcatgaagagaaagcggcgctgacctgcggtgatggggcgtttattcgtgacgaggctaacattacgctggttgccgattccccactgcgcgctttgctgatagatttgcctgtctaattgtttttacagggagatgatgatgagtaaaaaattggccaaaaagcgccagccggtgaagcccgtggtggcgaaagaacctgctcgcaccgccaaaaattttggctatgaagagatgttgagcgagctggaagctatcgtcgcggatgctgaaacgcgtttagccgaggatgaagctaccgcgtaaagacaggttgccggatgcggcgaaaacgccttatccggcctacaaaatccaacaacattaacgaattaaacaacccgtaggccggacaagatgcgccagcatcgcatccggcacgatccccaaaacctggcgtttatctggccttgctcgccataatctcgataatctgccgatccgtttgctgcatgctatggcttgctaacgcacacaggttggcaatgctctgctcaacatcatgcgccacaatcccttcattgccggtcacggcggtatcatccagcgccattaacaccgctttccacgcagcgctagcactggtgctaaccttcatcgcgcagctgttgctcgcaccatcgcaaatcatgccgctgacatcgccgatcatactgctgatcgccatgctgatggtttcataacgcccatccaccagccatgccatcccggcggcggcccccattgctgcggtcgttgcggcacacagcgcagacaaacgcggtaactggttatggatgtaaattgcgctcaaatggctaagcatcagcgcacgcgccagccgttcatcatccgctccgaagtgttctgctaccaccaccacaggcattgttgcggtaatcccctggttaccgctgccggagttactcatagccggaagcgtagcgccgcccatacgcgcatcggatgccgcgctggtacgaatcacaatggaactagagagatctttcgccagcaaaccgcgctcgcactgtttttccagcgtcgcgccaatatgcagcccccacttaccgctcaaaccttcctggcttaacgcacaatttagcttcgcggaatcgagaataaagcggatcgccgcaaacgggacttcattgacgaacttcaggatctcagccagcgtcgttctggaaagcaccgtcagcggagactcttgctcgccctctgccacacacgcctgctgggtaaacaccacaccatcgtgcgtctcgatatgcacaatgttggtatgcccgccgacgatggtgacacacgcccacttctcaccgttccagactttggcgcgactgaagaggatttcatcgcaaggttcctggatcttaacggagactttccccgccgccagcagtgctttggcatcggcaattgcctgcgctgttgcgtctttcagcacttccagcccggcgttggcatttccacctaacgcccccagcgccgccgcaatcggcagccccaccattcccgtgccgggaacggtgacgcccagaccgttcttcatcagatttgggctaacccaggcttctacacgttcaaccggaccttccagttctgccgcagcaaccgccgccgccagcgccagactaatcggttcagtacatcccagcgccggttttacttcctcctgaacggcgaggatgtaacgctgccataacggatttaaagtgctatcaaacatattaaaaaccttaaaatttcaggtaaatcaagaaaatgccaggaacggagaaacacacagcaacaaaccagtgacgataatcaggtacagagacatccctttgtatttgtgcaatgctggtactttgtaaaccagccacgccgggatcaggcaccctaccatgccgaaaatcgggctacagatagaggtgaagctcaacaccggtgcgttcagtacgatggcgctccaggccagcaaaatggcgaaaatcatgatgccgcgctgaacgagattttcgttaatcttctcggcaggcatcttgcgacgcaggatgttcattacgatcccttgcgttgcttcgcgaaagcctaaatagacgccaaagaatgcagtcatgacagcaaagatattgagaatgacgctgaccactttcacccacgctgcgccgtcaccgctaataaactgtgcggcaatcgccagcgcggaaatattctgctcataggcttttaccgcttcgtcatgtcccatcgccagcgtgaagctcacggcgtagaaaaagacggtgacaaacaaaatgccaaacgcgatattcattgcccgcaatgctttatgccgcgccacttcaatacttttttcccggctgcgataagagatcaccatcggacttaacgtctggataaacagaatgctcgtcagggtaaacggcagcgtaataatggcgtttttcaccagcagccccagcggcggtaggctaccgacgttatacagatgccacattcccaccatgctcacgcccagcgccgcgaccaccagcagcttggtcagcaccatgccggtgctaattttgaataacaatttctcgccgcgactggagatcgccaccagaatgcaaatcagtaccagaccataaaagggactgtcactcagcaacccttccgtcacgccgaaggtatgcaggtaggaagcactatcgttggtgatggcggtggaatagacgaacatccaaatcaccagcattacgaaatagagcgcacctaacaggatgccccagtttttacctaaataaccgctaatgacgctcgggtaatctttacattctggactttctgccagcgtattaataaacaatcgctgaaacagatacattgccgggtaaccaatcacgctactgagcaaaaatacccacaatcccatcaaaccgacctgcaccgggagaaaaacaatccccgcgccaatcgccatcccgatactcataatcacccagccggtgtcagtactgtcgaatttgatcgcttctcgccactcgctctcactcattccagcacgacccgccggggtcgaagcgtctgcaatgacgcctttattcgatgcaatttccataatttctcgctcaatattttgtagggcttattatttttttccgagccgcatcaaggcgatatgcggtctacgtttttgcaggcgagttattagaataaagaaatgatacgcgcgaggtcagagaaaatcttcacaatcaagactttgaaataacggagatggataagaattttctactaaattaatcgcaggagaatattcattctctatttgcggcagatcacaaaaaaaaggtgcacatttgtgcacccaaggatgaaagctgacagcaatgtcagccgcagaccactttaatggccagtcctccgcgacttgtttcgcggtatttatcgttcatatctttgccggtttcatacatcgtctcgatcactttatcgagactaacacgcggtgcgctggtgcggcgcatcgccatccgcgcggcgtttactgctttcacggcattaatggcattacgttcaatgcacgggatttgtacctgtccggcaaccggatcgcaggtcagcccaaggttatgctccatcgcgatttccgccgcattgcatacctgcgccggactgccgcccagtagttcagttaaccctgccgccgccatactacaggccacgccaatctccccctgacagccgacttccgcgccagagatggaggcgttcattttatacagcgcgccaatagcccccgcggccagaaaatagcgggcaatactccgctcgtttaccggacgacggaacttatcgtaataagccagtactgccggaataatgccgcacgcaccgttagtcggtgccgttaccacgcgcccgccagctgcgttttcttcactaaccgccagcgcgtacatgttgatccagtcgatgacattcatcggatcgttagagatgttatcgctggaaaccagctgacgacgcagcgctacggcacggcgcggcacattgagcggaccaggcagcacgccttcagtgttcatcccacgttcaataccgtcatgcatcacttgccagatacgggcaaaaccggcgtcaatttccgctttgctgcgcagcgctagctcgttgtgcatcatcagaccagatatagacaggccgttgtaatcacacattttcagcagttcacctgcactgtggaaatcgtaaggtacggacgtttcgacatcgtggctcaggccgaagtgttcttcttcgacaataaacccgccgccgacagagtaataggttttacttaatagctcttcctgtcccttccaggcagtgatccgcattccgttctcatggcgaggcaacatttcgggatggaagataatgttctttgctacaggaaaatcaacaatatgcgcaccagatgccactggcagccgcccgctgcgcgttactaactctataaatgcagggatctcatcaatgacaacatcctgcggactgtttcctgccagtcccatgatgatggcgacatccgtggcatggcctttgcccgtcagactcaagctcccgtacagatcgaccacaatatggctcgtcgcggttaataagccgctactttccagccgatcaataaaactttttccggcattcattggccccacggtatggctactggagggaccaatcccaattttgaaaatatcgaatgcactaatcatatccacaccctcggattgccgttcagtgaagtggagcggaacgaccttacgaccgtcccgctcacgaggctttacgcactacgtactgcgatggcttcaatttccagcttcacatctttcggcaaacgcgcgacctgcacacagctccgggtcggataggtcgcctgatgctcatcgaagaactgcttatagacttcgttgatggtggcaaaatcattcagatcggtgataaacacggtcatcttgatgatatcgcccacgctcagcccggcagcaaccacgatcgctttgacgttttcgaggcttaaacgcgcctgatcttgcacatcagccgggatctcaccggtctgtgggcaaaccggtatttgcccggaggtgaagaccatgctgcctaaatcaacgccctgaacataagggccgattgcgcctggggcacgttgcgtttcgataatctttttcatacatcctccggcgtcagagcgcctgggtaaaggtacgactaataacatcctgttgctgttcacgggtcagtgcgttgaagcgcacggcgtagccagagacacggattgtcaggttaggatatttttccgggtgctcgatggcatccagcagcatttcccgattcattacgttgacgttgaggtgttgaccgccttcgacatccgcttcgtggtggaaatacccatccagcaggccgacaaggttggttttacgtactggatcttctttgcccagcgccgcaggaacgatactgaaggtgtagctgatcccatctttggcgtaggtgaacggcagtttcgccacgctcgtcaaactggccacggcacctttgcggtcacgaccatgcatcgggttagcgcccggcgcgaacggtgttccggcgcgacgaccgtccggcgtattaccggttttctggccgtacaccacgttagaagtgatagtcagaatgctctgggtagggacggcgttgcgataggttggcagcgctttaattttcttcataaagcgttcaaccaggtcgcaggcaatgctgtctacgcgctcgtcgttgttgccgtactgcggatattcaccgtcgatttcaaagtccaccgccaggccgttttcgtcacggattggtttcacgcgggcatatttgatggcagacagggagtccgtcgccacgctcaggcccgcgatgccgcatgccatagtgcgatagacatcacgatcgtgcagcgccatcaggctagcttcgtagctgtacttgtcgtgcatgtagtgaatgatattcagcgcgctgatgtactgcaccgccagccagtccatgaagtgatcgaggctgtccatcactttgtcgtaatccagcacgtcgtccatcagcggtgctgttttcggcccgacctgaatcttcagcttctcgtccaccccgccgttaattgcgtagagcagcgttttcgccaggttagcgcgtgcaccaaagaactgcatttgcttaccaatcaccattgggctgacgcagcaggcaatcgcgtaatcgtcgctgttgaagtcagtacgcatcagatcgtcattttcatactgcaaggaagaggtgacgatgctcacctgcgcggcatattttttgaaggcaatcggtaattcttcgctccaaagaatggtcaggttaggttccggtgccggccccatagtgtgcagggtgtgcaaatagcggaaggagtttttggtcaccagcgtacgaccgtccagccccatcccgccgatcacttccgtcgcccagattgggtcgccggagaacaggctatcaaattccggtgtacgcaggaagcgtaccatacggatcttcatgatgaagtgatcgatcagttcctgtgcctgctgctcattgagtacgccagctttaaagtcgcgctcaatgtagatatcgaggaagcttgccgtgcggcccaggctcatcgcgccgccattttggcttttcactgccgccagataagcgaagtagagccactgcaccgcttcctgcgcattctgcgccgggcgagagatatcaaagccatatttcgccgccatttcctgaatctgcaacagcgcatgacgatgctctgccagctcctcacgcagacggatggtggcttccagatcctcgcctttttccagacgagactggagatcggcaaattgcagttcgcgttcacgtaccagataactgatgccatacagcgctacgcggcgatagtcaccgataatgcgcccacggccatagccatctggtaaaccggtcagcacgccagatttacggcagcgcagcatatccggactgtaaacatcaaatacgccctggttatgggttttacgcagatcggtaaacagatattcaaattcactgtccatttctcggccataggcgtggaaactacttttaatcatattaatgccaccgaacgggtgtagcgcacgtttcaacggcgcatccgtttgcaggccaacaattttttccagcggctggttaatatatcccgcatcatgagcggtaattgtggtggcaatattggtatcgaaatcaaccggcgcgtgggttgcattttcgatacggatgccttccattactttttcccacaattccgtggtggcaggcgtcgcttcggcgaggaaagattcatcgccttcatacggtgtatagttatgttgaataaaatcgcggacattaatttcgtttttccagtccgtacctttaaagccaagccatgcgtcggcgtacagcttatcgctggtatcaatatctaccttcatgaaaaataatctctctacaatacttcaactaaattatgcaaattctgcgggcgcgttaactttgcctaaatgaatggcatccaaagcaatcattttttcttcgttagtcggaataacggcacaaatgacacgcgcattttcactggaaacaattcgctcaccacaggagttagagcgattattcatttctgtatcaatctctaagcctaatacagccaaatgttccatgaccagacgacgaattaagctactattctctcctattccgccggtgaatataattccatccaggcgacgtaaactagctgcgtgtccggcaatatgacgggcaattcggtgaacaaaggttttaattgccagttgcgcgcgttcgtgaccttcatgccaggctttttccagaacacgtaaatcgctagaaagaccggaaatacctaataatccgctctctttattcactacgcgttccaggtcacccaggctctggttggtttggctggcgacccaggacatcgcaccaaagtcgacatcgccactgcgggtacccatcatcaagccttccagcggcgtcattcccatactggtatcaacactctgaccgttgcgaaccgcgcagatactcgcgccattgccaagatgcgccacaaccaggccggagtcatcttccgccagattcagcaggctatgtgcgcgctgggaaacatagcggtggctcgtgccgtggaaaccataacggcgtacacctaactcttcataatatttccacggcaggccgtataaataagcttccggagccatcgtctggtggaaactggtatcaaataccgccacctgagttacgcccggaaataattgctgcgcgctttcaataccacttaaattggcgtaattatgcaggggtgccagtggagaaacgcgacggatattatcaatgacttcatcggtaataatggcggactcggtaaaaatactgccgccgtgagcgatgcggtggccaattaaggccacactgtcatttaaattccgtttttccagttcaaatgcaattgccttcaatgcaccttcgtagctgtggtgagccagcggtgctggctctcccccatttacggataagaatgcattttcgctgttaataccgtcggcaataccactcattaatacttcacagtcgctggcatcgagcacggaaaacttaatgctagagctaccacagttaataaccaaaacaaccggaaattcattcatctcttttctcatcctgagttacggattaaaacagtttgtatacgatgttcaggatggtcagcagaccaatcacggtaacaaacacgttatccagacgaccacggtatttcgccagagacggcgctttacggatggcatacatcggcaacaggcacagcagggatgcgataatcggtgcgcccatggcttcaatcaggtcaaggatgttcgggttggcgtaggcaacaacccaggtggagcccatgatgaagatcatgctgatagtgttcagtttacccaggctcactttagttttgtcgcctttataaccaaacttcaggaccaggccattcagaccttccagcgttcccagatagtgaccgaagaaagatttgaagatagccacgagtgcgatgatggaagccgcatattccagtgtaatcgcgaacgttgttttggtaccggtcatggacgcaaagtggttagccagataagaaagcactggaatattctgcgctttggcttccgccatgttggccggagacagagtaaacaggcagctaaaggcaaagaacatcaccactgcaaccatcagcatgctggcacgagaaatgatttgggaacatttacgttcggtgaagtcgcgaccgaagtctttctcatactcttcacgcttagaaaccacgaaggaagagacgattgggctgaagttaaaggagaaaaccatgatggaaatccccagccagacagtgatcaggataccgtcatgaccggttaagctcaggctaccgaggtcaacctggtcgataactgcagagttccagtaagggatcaggctcaaagaaatcagcaccaggctggcgataaacggccataccaggtagctcatcactttaaccatcagatccttaccaaaccagatgacgaaagccatcagcagcaacaggaacagcgccacaaagccgcgattcagcggtgcaaagccgagctggttttcccagaacgtcataaaggtattggtaatagtaacgccataaatccacagcagtgggcaaatcgcgaagaagtacaggaacgtgataaccacgccgccagttttaccaaaatgctcttccaccgtttccgtaatgttgccggaagggttagagccagaaagacacagacgcgccagcgcccggtggcaataaaacgcgatggggtatgccaataccaacatcagaagaatcgggatcagtccgccaaaacctgcgcggatagggaagaacagcaccccggcgccgattgccgtaccaaacaagcctaacgtccatgtggtatcacttttacgccaggagctttgttttgtctggctggatacaatgctatcactagtactcatatcctatcctcaacgaattaattaagcgtcaacgaaaccggtgatttgagagacgcgagaaagatcgatattgccgccggaaataatactgacggtttttctgttttgaatatattggtctaatttaccgcttaataatgcagcacatgccagagcgcctgcgccttcggtgacgactttattgcgctgaattaaggcaatcatactgtttctgatttcgtcttcgctgaccagcacgatgtcatcgactaattcacgaacgatttcgtaagttaaattacccgggcgggagacatcacaaccatccgccagggtgccggtagttcggtgcgtggttatttctccggagtggaaagaagccgccatgccgtgaacgttttcagactgtacgccaataacacgaatggtcgggttaatagatttaattgccaccgcaataccagcaattaaaccgccaccaccaattggcacaatcacgttatcgacatcatagagatcttccataatttccagaccaatcgttccctggccagcaatcactttcggatcatcgtaaggtgggataaaaatacggccttccatttcgacaatttcgctcactttagcgatagtgtcgttgaagttatcaccatgcagaacgacttctgcggagtagtcgcacgttgccgctactttggattttggcgcaccttttggcatcaccactttaccgtcgatacccagcatcgcgcaggagagggaaaccccttgcgcatggttgcccgcagaacaggccaccacgcctttgcgtttttccgcatcggtcagactacttaatttattaaatgcgccacgaattttaaaactacccgtacgctgcatattttcaaacttcaggaatatttcacctttgcaacgttcactaaaatagttggagcgaggcatgcctgttttataaattcgcccagccagtcgttgtttcgcttcaataatgtcatcaatagcaaccggcagatcgtatgtaatatgcattataaaacctcttcgcctgaattaaatatgtaggtaaccgtaaccgacacctgcaagacagacaggtggattatttatgtttaaataaaaacaaataattaaccaacttctattaattgccttcgtctacacccattataagaactatactctttggctaattccaccaaaacgcttgctgcttttttaatacgataatttttgctccataccgcggcatattgtgccacaggtaatgtttcttcaaccggaatagtaataaattgattagaaccaaaaggactcgtcatatcacaaggaattacagttaagaaatcagcattgagaacaagattataaattgtcacgacactgtcggttttaacgatgttttcaatactgatgccatttctttgtaacgtagtaagcagttcgctgtagtaccccatattagtttgtggcaacacccactgttcgttcttcaagctctccagcgtggtggtgccggtgcatgttcgggacttactggctaccagcacaaactcggactcgaacagcggctcaacatgtaaatcctgaagcttcatttctgcacttaacgtaccaatcgcaaaatccagtcgaccgtcgcggattgccggtaagaagctagacagttgcgcttcatacatagaaacctgcgctttcgggaacacctctttgaacttgttgatcatcccactcataaaagtaaaaccaatcaaactaggaaaaccaaaactgacttccaccaccgcctcagaagacataccgcttatctcattaaccatatttttcatttcacgggtaatggattcggaacgggagagtaacaattgaccggcaggtgttaatgttacaccggtatttttccgcaccactaattccacaccaaaataatcttcaatatcgttaatgattttactgacggccggttgagttaaccctaattcttttgcagcgctgccgatagaaccacttctaatgacttcctgaaagactaccaggtgctgcgttttcggaagaagaatagtgctcataacgacctacgttaattacctcattgacggcatgaagtgtatcaaaatgaaatgaacaggatatgtgcgaccactcacaaattaactttcaatactttccagagtatcgttattacaattaaatacctttaaatatcaacaagttaaagtataaaaatcagcataaaccctgatttttgtcaaaaaaaatgacggggataaccatattttatggcgataacatcattcgttatgtggttaatacaaaaaaggggctgagaccatatttcaagcaattaccggataattaccaggcaaaatttgagttaaatttaatgagcaagttcagtaattttattataaataaaccatttagtgtgataaataatgcggcatgtcacatttttagtcgctatttgttggagaacaaacatttattttatcaatattttaaaattagcaatacatgtattgatcatctcgaacaattgattaacgtcaactttttctcttctgacaggacgagtttttgtgaatgcaatcgttttccataaattcttctcccctcataggcgacgaatagcattttgtgttgaggattacaaaacgaataattgctgatcgccgcgataaggtcagacaaagacaacaagggaaattttcacagagcttttgatcggcgtaggccacagaatgttgcttcgtttactgtaacgccgggtaaatgagcgttttttgatagtgcgaaagaaccctgcgaggaaaataagcatctattattgtttgtcatgatgacaaggcaggcatcaatgaaaggcttcccaattgcgcatatttttcaccctagtatcccgccaatgcacgcagtggttaacaatcacaatagaaatattgattattggacggtaaaaagaaagtttgcagaaattgtctccaccaatgacgttaataaaatttacagtataagtaatgaactgcggagagtattatctgcaataactgcattgaatttctatcatggcgatgttccttctgtcatgatccgaatccaaccggaaaatatgagtccattcattatagatatttctacaggagaacatgatgattatatcatacaaacattagatgtaggcacttttgcaccttttggtgaacaatgtacttgcagtgccgtcaataaaaaagagctggaatgtattaaggagacgatttctaagtattgtgcaaaattcacccgaaaagaagccatcttaaccccccttgtgcactttaataaaaccagcattactagtgattgttggcaaattctcttttttagtcccgatcattttaataatgatttttattgattatttataaaggataaaataatgttccctgttagtagtattggtaatgatattagtagtgatttagtccgtcgaaaaatgaatgaccttcctgaaagcccaacaggaaataacctcgaagcactagcaccaggtatagaaaaactaaaacagacctctattgaaatggtcactttacttaacacgttacaacctggtggaaaatgcattatcactggtgattttcaaaaagaattagcgtacttacaaaatgtaattctttataatgtcagctctcttcgtctggattttttaggttataacgcccaaattattcaacgaagcgacaatacttgtgaacttaccattaatgaaccgttaaaaaaccaggaaatatccacaggtaatatcaatattaattgcccattaaaagatatttacaatgaaatcaggaggttaaacgtaatttttagttgtgggactggagatatcgttgatctatcctctctggacttacgtaatgtcgatttagattattatgatttcacagataaacatatggctaatactattttaaatccttttaaattgaatagtacaaattttactaatgccaacatgtttcaggttaattttgttagtagtacacaaaacgccacaatctcctgggattatttactaaaaataacgcctgttttaataagcattagcgatatgtattctgaagaaaaaatcaagtttgtcgaaagttgtttaaatgagcctggagacattaccgaagaacaattaaaaattatgagatttgcaattataaaatctataccaagggcaactcttacagataaattagaaaatgaattaacaaaagaaatatataaaagcagtagcaaaatcatcaattgcttgaacagaattaaattaacagagatgaaagaattcagtagtgaaaaaatatatgattacatcgatataatcattgaagattatgaaaataccaaagaaaatgcttatctggtcgtcccccaaattaattatactatggatttaaacatagaagactctagcagtgaagagttacttagtgataataccctcgagaaagacgaaaattctccggacaatggctttgaggtcggggaatataacacatatgaagcatataacagtgagaagcaatattttaccagagaggactatacgtatgattacgaccttttaaatgcaatataaacttaataacttcttacaaagtctattattaataccgtagatatttattcatcttaccctgtgcaccaaaagcaaaaactcactgacgcgggtttgaaactgatggcaaccgcaaaaatgcctgatgcgctacgcttatcaggcctacgccatctctgcaatatattgaatttgcgtgcttttgtaggcaggataaggcgttcacgccgcatccggcatgaataaagcgcactcaacaatctgaaacccgccggaacggtttattacgtacatcaggtaaaactgaccgataagccgctttcttttgggtatagtgtcgtggacagtcattcatctttctgcccctccaaaagtaaaaacccgccgaagcgggtttttacgtaaaacaggtgaaactgaccgataagccgctttcttttgggtatagtgtcgtggacagtcattcatctttctgcccctccaaaagcaaaaacccgccgaagcgggtttttacgtaaaccaggtgaaactgaccgataagccgctttcttttgggtatagcgtcgtggacagtcattcatctttctgcccctccaaaagcaaaaacccgccgaagcgggtttttacgtaaatcaggtgaaactgaccgataagccgggttctgtcgtggacagtcattcatctaggccagcaatcgctcactggctcaagcagcctacccgggttcagtacgggccgtaccttatgaacccctatttggccttgctccgggtggagtttaccgtgccacggactgttaccagccgcgcggtgcgctcttaccgcaccctttcacccttacctgatcccgcttgcgcgggccatcggcggtttgctctctgttgcactggtcgtgggtttcccccccaggcgttacctggcaccctgccctatggagcccggactttcctcccctccgcccgtctcccccgaagaggacgacgacgaagcggcgactgtctggtcagcttcggcgcgcagtatagagggtttgcgcgcccttgtcaccccgcgttgcgcattccaatcgccagtgtcgcggcgatattacgactagcacggcagatattgtcataagccccgcggaatgcttcgtccaacgtacctatgctggtcaatacgctgaagaccgcatcaatgccatgctgatgtacaacgccaacatcatcggtcaggctacccgcaatgccaatcaccggtttatggtacttcttcgccacgtttgcgacaccaatcggtaccttcccgtgaatactctggctgtcaatacgcccttcaccggtgatcaccagcgtacaatcgtgaatatgttcctccagattcagcgccgtagtgacgatttcaataccacttttcagttccgcaccaagaaacgccattagcgccgcgcccataccacccgcagctcctgcaccggggacatctttcacatcaacatgcagcgcttttttaatgacctcggcatagtgagagaggttattgtccagctcaacaatcatcgcttcactggctcccttttgtgggccaaagatgcggcttgcgccgttatcgcccaccagcggattggtgacatcacaagcgacgcgaatgacgcaatcttttaagcgcggatcgaggccggaaatatcaatatcattcagagtattaagactaccgccgccaaaaccaatttcattgccgttggcgtcgcataatttcgcccccagcgcctgtaccatgcctgcgccgccatcatttgtagcgctgccgccaatgccgataataatgtttgtcgcaccgctctccagcgcctgcaggattaactcgcctgtgccgcgactagtggtcacgagtggatcgcgtttttccgcaggtaccagctccagcccactggccgccgccatttcaataaacgcggttttgccatcgccggagatcccccaactggcattcactttctcgcccagcggccctgtaacccaggcgtgacgttcagccccctgggtggctgcaatcatcgcttccaccgttccttcgccaccgtcggcaaccggaacagaaacgtactgtgcatcaggaaaaatttcccgaaatcctttttctatcgcctgcgcaacctcgctggcagataaactttctttataagagtctggggcgattacgattttcatacctatgcctgttaccacatgacgccggagggcgtttctcttattcggcctggattccaggcccggattgcaatacgccatccgggcacgacgtcattaacgagtaacttcgactttcgccagtttttcgtagtagcacgccagggcgctatgatccgccgttcctaaaccatctgctcgcagtgcctgcatcatctccataaccgcagctgtgagcggcagttgtgcgccgacgccgtgagaagtatccagcgcattcgccagatccttaatatgcagatcaatacggaagcccggcttgaagttgcggtccatcaccatcggcgctttggcatccagcacggtactgcccgccagtccaccgcgaattgcctgataaaccaggtccgggttaacgcccgctttagttgccagcgttaacgcttcactcatcgcggcaatattcagcgccacaatgacctgatttgccagtttggtgacgttacctgcaccgatttccccggtatgcaccacggaacccgccatcgctttcatcaaatcatagtatttgtcgaaaatagccttgtcgccgcccaccatcacactcagcgtaccgtcgatggctttcggttcaccgccgctcaccggagcatccagcatatcaatgcctttcgctttcagcgcttcgctgatttcacggcttgccagcggtgcgatagaactcatatcgatcaataccgtacctggcttcgcgccttcaataatgccattctcacccagcgccacctctttcacatgaggggagtttggcagcatggttatgatgacgtcgcactgttcagcgatcgctttagccgtagacgctgtttctgcacctgcagcaatcacgtcagcaatagcttctgggttacggtcagcaaccaccaggctgtaacctgctttcagaaggtttttactcattggtttacccataatccccaggccaataaaaccaactttcatagtcatatcaatcatctctcttgttgcggtggtggttattttttaaaggtatcagccagtttctgagtggcagagcggaagacgccgagatcgctgccgacagccacaaacgtcgcgccccattccagataacgacgcgcatcggcttcgaccggcgcgaggataccgctgggtttgccgtgcgcgctggcacggttaaaaatgtgctgaattgctttttgtacatccgggtgacttgcattgccgagatggcctaatgccgcggccagatcgctggggccgacgaagatgccgtctacgccttcggtagcggcaatggcatcgacgttatctacgccctgctgactttctatctggaccagaatagtgatgttcttgttgctctgagcgaaataatccgccacggtgccaaacatattggcgcggtgagaaacggagacgccgcgaatgccttccggtgggtaacgggtacttgccaccgccagctctgcttcctcttttgtttctacaaaaggaatcaggaagttatagaaaccgatatccagaagacgcttaataattaccggctcgttggtcggcactcgcactactggcgcgctggcgctgcctttcaaggccattaactgcggaataaacgtggagatatcgtttggcgcatgttcgccatccagcaccagccagtcaaacccagccaaaccaagaacttcagtgctaatcgggttagagagtgcactccagcaaccaatttgtacctgtttcgcagccagtgcggctttgaatttattcgggaaaacatcgttattcatcgcttatacctttgcttatttctgcaattccatacgtttaatgtcgccaactacgaagaggtagcagaccatcgccatcagcgcactacatcccacgaaaaccagtgctgcattgaaggagtgcagttcacttaccaggtagccaatcaccagtggagtgacaatggaggcaacattgccaaagacgttaaagacgccgccgcagaggccaacaatctctttcggcgcggtgtcagaaatcaccggccagcccagcgcaccaaatcctttgccaaagaaagccagcgccatcagcatgaccaccagcgtggtgttgttggtgtagttacataagatgatggtggaagccagcaacattcccagcacaatcggtagcttacgtgccagggtcagggataaaccgcgtttgatcagataatcgctgaagacacctcccagcacgccgcccgcaaaaccacacagtgctggaatgctggcgaccagacccactttcagaatgctcatgcctttttcctgcaccagataaatcgggaaccaggtgaggaagaaccaggtgatggtgttgataaaatattgtccgaaaaatacgcccagcatcatgcggttagagagcaattgcttgatgtaatgcagtttgggtccgcttgctgccgcactgcccggctttttgtggtccatatcgaccaccgcgccattttcagagataaacttcagctcttccgcagacatacgtgggtgatctgtcgggttatgaatcaacttgatccacagcgccgtcagcacaaaaccaatcacccccataacggtaaagacgtgctcccagccccaggcgaaagtcagccagccaagcagcgggctaaagagcgccaggctgaaatattgcgcgctgttaaagatggcggaggcagtaccacgttctttcgtcgggaaccaggcggcgacaattcgggcgttcgccgggaaacttggcgcttcgctgaagccgagcataaagcgcataaagaacatggagatccctgcccaggccagcgggaacatatcaacaaagccttgcaggaaggtgaataggctccagaaaaagaggctgtaggtgtaaacttttttgctgccaaacttatcaagcagccagccgccggggatttgcatcagcaagtaggcccagccaaaagcggagaagatgtaacccatgctaaccgcacttaactgcaactcttttgccacttcggtaccagcaatagacagcgttgcacgatcggcgtagttaacggcggtaacaataaaaataatcagtaatattaaatagcgggtatgcacgcctttctttttttcgtcaacggtgtccagaatcattttatttacctcgggtacttatgctgatttttattattatggggaaggtgttatttatgagtttcatttatgccgtaacgacaatgaactcgggaattagtataagcagcgcgagaataataatcattgtgcaaatgctaatttaattaatactatttaaatattattttgagcatatgcacataaggttgcgcgctaaagcacagatttgcgctttaccttaccgggcggcactgcaatccctgaaatgattgacattgatcacatttctgcgtttaaactcctgacattcttatttcacccaatgaagtcatttatttttaaatgagaccaggtcctcattttaataacccctggctggagaatattgcacaatggccaacatcgaaatcagacaagaaacgccaactgcgttttatataaaagttcacgacacagataatgtggcaattattgttaatgataatggcctgaaagcaggaacgcgttttccggatgggctggaattaattgaacatattccccaggggcataaagtcgcattgctggacattccggctaatggtgaaattattcgttatggcgaagtgattggttacgccgtgcgtgcaatcccacgcggaagctggatcgacgaaagcatggttgtactaccggaagcgccgccgttacacacgctgccactggcaaccaaagtcccggaacccttaccgccgctggaaggatacacctttgagggctatcgcaatgccgatggcagcgtgggcaccaaaaacctgctcggtatcaccaccagcgtccactgtgtggcaggcgtggtggactatgtagtaaaaatcattgaacgcgatctgctaccgaaatacccgaacgtcgatggcgtggtggggctgaatcatttgtacggttgtggcgtggcgattaacgcaccggcggcagttgtacctatccgtaccattcacaatattagcctgaatcctaactttggcggcgaagtaatggtgattggcctgggttgtgaaaagttgcagcctgagcgcctgctgactggaacggatgatgtgcaagctattccagtagaaagcgccagcattgtcagtttgcaggatgaaaagcatgtcggttttcagtccatggtcgaggatattttgcagatcgccgaacgccatctacaaaaactgaatcaacggcagcgagaaacctgcccggctagtgaactggtcgttggtatgcagtgcggtggcagcgatgcgttttctggtgtaacggcaaacccggcggttggctatgcgtctgatctactggtgcgctgcggcgcaacggtgatgtttagtgaagtaacggaagtgcgtgacgcgatccatctgctgacaccacgcgcagtgaacgaagaggtcggcaaacggctgctggaggagatggagtggtacgataactatctcaatatgggaaaaaccgaccgcagcgccaaccctagcccgggcaacaagaaaggcggtctggcaaacgtggtagagaaggcactcggctccattgctaaaagcggtaaaagcgcaattgttgaagtgctgagccccggtcaacgcccgactaaacgcggattaatttacgccgcgacgccagccagcgattttgtctgtggcacgcaacaggtggctagcggtatcacagtgcaagtgtttacgaccggtcgtggtacgccgtacggcctgatggcggtacccgtcattaaaatggcaacccgcaccgagctggcgaaccgctggtttgatttaatggatattaatgcgggcaccatcgctaccggcgaagaaactattgaagaggtgggctggaagttgttccactttattctcgacgtcgccagcgggaagaagaaaaccttcagcgatcaatgggggctgcataaccagctggcggtgtttaacccggcaccggtgacctgatttcttttggaacgtccctcgcaaaacatggccttagtgccatgtttttattgtttaaagcccccacgtccattaataatgcatttgcattaccttagttcaagcttataatttgagcagaaaacaggctgtaaaaggacagtgaatcatgcccgctaatgctcgctctcacgctgtactgaccactgaaagtaaggtcacgatacgcggacaaacaactatccccgcgccagtgcgtgaggccttaaaactgaagccaggccaggacagcattcattacgaaattctgcctggtgggcaagtatttatgtgccgactgggagatgaacaggaggatcatactatgaatgcatttttgcgttttctggatgcagatatccagaacaacccgcaaaaaactcgtccattcaacattcaacaaggaaagaaacttgtcgctggcatggacgtcaacattgatgatgagattggcgacgacgaataatggattttccacaaagggttaatggttgggcgctatatgctcatccctgttttcaggaaacctacgacgctttagttgccgaagtcgagacattaaagggaaaagatcctgaaaattatcagagaaaagccgccacaaagttattggcggtagtccataaagtgattgaggagcatatcacggtcaatccaagtagtccggcattccgtcatggcaagagcttaggctctgggaaaaataaagactggagtcgggtaaaatttggtgctggtcgttatcgtctcttctttcgttatagtgaaaaagagaaagtcatcattctgggatggatgaacgatgaaaacactctgcgcacctacggtaaaaaaacagatgcctataccgtattcagcaaaatgttaaaaagaggacatcctcctgccgactgggaaaccctcacccgagaaacagaagaaacccattgatggtgttcacaatgcccgccgaacgcattcgtgttgaccagcgggcatcctttctcactccccgaccagaatcacttcaaccccagcctttcgcagtccttccaggctatccgcaggaatgccttcatcaacaatgatcatgtcgatacgttgagtatcaatgatcttatgtaaactggaacgattgaacttactggaatcggtgaccacgatgatccgttccgcaacttcgcacatccgacggtttaaacgagcttcatcttcattatgtgtgctgacgccgcgctccagatcgatcgcatctacaccaagaaacagcatatcgaagtggtaattttgcaggctttgctcagcctgatcgccgtaaaaagattggctctgacggcgcaaatgcccgccggtcatcagcagctcaacgccttccgcttccagcaacgcattagccacgttcataccgttggtcatcgcaattacgtcagtgtgcttgcgcatcagacgagcaatctcaaaagtggtggtcccggaatcgaggataacccgatgacctggctgaatcaactcaacggcagctttcgcaacgctgcgtttcatcgcggtgttcagtgcgcttttatcttccacacttggctcgacactcggcgtcgtgctatcgcagatcaacgcgccaccataggcacgcacagcgatcccctgcttttccagaaacgccagatcgttgcggatcgtcacagtagatacgccatacaatgcgctcagatcgttaacctgcacactcccttgctgtcgcagacgctgaatgatctgttctcgtcgctcgctggtgccagtcactcgcttctcaccactagcgtcggtattactcatagtaagtcctttcgtaaaactttcgtttcatttcgttttgcctattaacgcctttctattaagcaaatgcaagcccaccttgcccattgacgcaagctactctcgtttcagtgactttcattatgtttcttttgtgaatcagatcagaaaaccattatctttcgttttatttttatctcaccatgacgcagtatcaactgaaacaaaacgaaagattaatatcgcagtaatctgaactggagaggaaagtgaaacatctgacagaaatggtgagacagcacaaagcgggcaaaacaaatggaatttatgccgtttgttccgcacatccgctggtgctggaagctgcaatccgctacgccagtgcaaaccaaacgccgttactgattgaagcaacctccaatcaggtagaccagttcggcggttataccggaatgacgcccgccgattttcgcggctttgtttgtcagctcgccgacagcttgaatttcccgcaggatgcgttgattctgggtggtgaccatctggggccaaaccgctggcaaaacctgccggccgctcaggcaatggccaatgccgatgatttgattaaaagctacgttgcggcaggattcaaaaaaatccaccttgattgcagcatgtcctgtcaggacgatccgattcccttaactgatgacatcgtggctgaacgcgccgcccgtctggcgaaagtggcggaagaaacctgtcttgaacactttggcgaagccgatctggagtatgtcattggtaccgaagtgccggtacctggcggcgcgcatgaaaccttaagcgagctggcggtcaccacgccggatgccgcccgcgccacgctggaagcccatcgtcacgcctttgaaaagcaaggtttgaatgccatctggccacgcatcattgccctggtggttcaacccggcgtcgaattcgatcacaccaacgttattgattatcagcccgccaaagcgagcgccttaagccagatggtcgaaaactacgaaacgctgattttcgaagcgcactctaccgattatcaaacgccgcaaagcctgcgccagctggtgattgaccactttgccattctgaaagttggcccagcgctgaccttcgccctgcgtgaagctctgttctctctggcggcgattgaagaagaactggtgccagcgaaagcctgttctggtctgcgtcaggtgctggaagacgtgatgctcgaccgcccggaatactggcaaagccactaccacggtgacggcaacgcgcgtcgtctggcgcgtggttatagctacagcgatcgcgtgcgctattactggccggacagccagattgatgacgctttcgctcatctggtacgtaatctggcggatagtccaattccgctgccgctgatcagccagtatctgccgctgcagtacgtgaaagttcgctccggcgagctgcagccaacgccacgggaactcattatcaaccatattcaggacatcctggcgcagtaccacacagcctgtgaaggccaataagcaaaacaaagaggaacacgctatgccaaatattgttttaagccggattgatgaacgcttgattcacggtcaggtcggcgttcaatgggtcggatttgcgggggcaaatctggtgctggtagccaacgatgaggttgccgaagatccggtacaacaaaacctgatggaaatggtactggcagaagggatcgccgtacgtttctggacgctgcaaaaagttatcgacaacattcatcgcgccgccgatcgacagaaaatcctgctggtttgtaaaacacccgccgatttcctgacgctggtgaaaggtggcgttccggtgaatcgcattaacgttggcaatatgcactacgccaatggcaaacaacaaatcgccaaaacggtttctgtggatgcgggcgatatcgcagcatttaacgacctgaaaaccgctggggtggaatgcttcgttcagggcgtcccgacagagcctgctgtggacctctttaaattactttgagggattcatcatggaaatcagcctgttgcaggcatttgcgttgggcattatcgcctttatcgctggcctggatatgtttaacggcctaacccatatgcaccgcccggtggtcctcggcccgttggtcgggctggtacttggcgatctgcataccggaattttaaccggcggtacgctggaactggtgtggatggggctggccccgctggcgggcgcacagccgcctaacgtgattatcggtactatcgtcggcacggcgtttgccattactactggcgtgaaacccgatgtcgcagtaggtgtcgccgtacctttcgctgtcgcagtacagatggggattaccttcctgttcagcgtgatgtccggcgtgatgtctcgctgcgacctggcaacaaacccgcgccgcatttgatgctggtgccgacggcctggtgcattgctataacgggatgacaggtttacatcaccgcgaaccgggaatggttggcgcgggattaacggacaagcgcgcctggctggaactgatagccgatggtcatcatgtgcatccggcggcaatgagcctgtgttgttgctgtgcgaaagagagaatcgtactgatcaccgacgcgatgcaggcagctgggatgccggatggtcgctatacgttatgtggtgaagaagtgcagatgcacggtggcgttgtccgtaccgcgtctggtgggctggcgggcagtacgctgtctgttgatgcggcagtgcgcaatatggtcgagttgacgggcgtaacgcctgcggaagccatccatatggcgagcctgcatccggcgcgaatgctgggtgttgatggtgttctgggaagccttaaaccgggcaaacgcgccagcgtcgttgcgctggatagcgggctacatgtgcaacaaatctggattcagggtcaattagctagcttttgatagtttgctcctttattgggccttcacttcccccgtaaggcctttctttttctttcgttttgatctgtgcagcggtgtcggatgcgacgctaacgcgtcttatccgacctacagttggtgaccgcaaggccggataaagcgtttgcgccgcatccagcaatcccttttgcttcctttatcttttctttcaacgatcacaaatttcgttttatttcttttttctccattgaactttcagtttcttttctatagattttaatcaacgaaagacatcaccaagtgaaatgaaacgaaaggcaagtgaaagcgacaacgcccgacgtcaagttcatcagactaaggattgagttatgccagaaaattacacccctgctgccgccgcaaccggtacatggactgaagaagagatccgccatcagcctcgcgcatggatccgtagtctcaccaacatcgacgcgctacgttccgcgctcaataacttccttgaaccgttactgcgcaaagagaatctgcggatcatcctgaccggagccggaacgagcgcatttatcggtgacatcatcgcgccgtggctcgccagccataccggtaaaaacttcagcgccgtaccgaccaccgatctggtcaccaatccgatggactacctgaacccagctcatccgctgctgttgatctccttcggtcgatccggcaacagcccggaaagcgtcgcagccgtggaactggcaaatcaatttgtaccggaatgctatcacctgccgatcacctgcaacgaagcgggcgctctttaccaaaacgcgatcaacagcgataacgcgtttgccctgctgatgcccgcagaaacgcacgatcgcggctttgcgatgaccagcagcattaccaccatgatggccagctgcctcgcggttttcgcacctgagacgatcaacagccaaaccttccgcgacgtggcggatcgttgccaggcgatcctgaccagtctgggcgatttcagcgaaggtgtgtttggttacgcaccgtggaaacggatcgtttatctcggtagcggtggcttacagggcgcagcacgcgagagcgcgctgaaagtgctggaactgacggcgggtaaactggcggccttttatgattctccaaccggattccgtcatggaccaaaaagcctggtcgatgacgaaacgctggtggtggtatttgtctccagccacccttacacccgtcagtatgatcttgatctgctggctgaacttcgccgtgacaaccaggcaatgcgtgtaatcgccatcgccgcggaaagcagcgacatcgtcgctgccggtccacatatcatcctgccaccgagtcgtcactttatcgacgttgagcaggcattttgcttcctgatgtacgcccagacgtttgcactgatgcagagcctgcacatgggcaatacgccggataccccaagtgccagtggcaccgttaaccgcgtggtgcaaggcgtaatcattcatccgtggcaggcataagaggatcgcattatgagcattatctccactaaatatctgttacaggacgcccaggccaatggctacgcggtgcctgcttttaacattcataacgccgagacgatccaagcgatcctcgaagtgtgcagtgaaatgcgaagcccggtgatcctcgccggaacgccggggacctttaaacacatcgcgctggaagagatctacgccctgtgtagcgcctattccacaacctacaacatgccactggcgctgcatctcgaccaccacgaaagcctggatgatattcgccgtaaagtccacgcaggtgtgcgcagtgcgatgatcgacggcagccacttcccgtttgccgagaacgtgaagctggtgaaaagcgttgttgacttctgccacagtcaagattgcagcgtggaagcagaactgggccgcctgggcggtgttgaagatgacatgagcgttgacgccgaaagtgcattcctgaccgatccacaagaagctaaacgctttgtcgaactgactggcgtcgacagcctggcggtagcgattggtacggcgcacggcttatacagcaaaacgccgaagattgatttccagcggctggcggaaattcgtgaagtggtggatgttcctctggtgctgcatggtgccagcgatgttccggatgaatttgtccgtcgcactattgaacttggcgtcacaaaagtgaacgttgccacagaattaaaaatagccttcgctggcgcggttaaagcctggtttgcggaaaatccgcagggtaacgatcctcgttattatatgcgcgtcggaatggatgcgatgaaagaagttgtcagaaataaaattaatgtctgtggtagtgcgaatcgaattagtgcataatcattagttttttatgatttatcccaatgtacttcccgattaatatcggggagtgccttaatggaaaaggagataactaaaccttaataaatacatcactacaatatcgcaacaataatatatttaaaaaaattatattattcaactttatggtgaggattacacaatgaccagtccaaatattctcttaacccgtattgataaccgtctggttcacggtcaggttggcgtgacctggacatccaccatcggtgcaaatctgctggtagtcgtggatgatgttgtcgctaacgatgatattcaacagaaattaatgggtattaccgcggaaacctacggctttggcattcgtttctttactatcgaaaaaaccattaacgtcatcggcaaagctgcaccacatcagaagatcttcctgatttgccgtacgccacaaacggtacgtaaattggtagaaggtggtattgacctgaaagatgtcaacgtcggcaatatgcatttcagcgaagggaaaaagcaaatcagcagtaaagtttatgtcgatgaccaggatctcacggacttacgttttattaaacaacgtggcgtgaatgttttcattcaggacgtccctggcgatcaaaaagaacaaatccctgactaaatctaaaatcgccttaatattggtttgaggtaataaaaatgcatgaaataaccctacttcagggattatccctggcggcgttagtttttgttctggggattgatttttggctggaagccttatttttattccgcccgataatcgtttgtaccctaactggcgctattctcggtgatattcagactggcttaattaccggtggtctgacagagttggctttcgccggattaacccctgcaggtggtgttcagccgcccaacccgattatggcgggtctgatgaccaccgtcattgcatggtctacgggcgttgatgccaaaacagcaattggtcttggcctgccgtttagtttgttaatgcagtacgtcattctgttcttctattccgctttcagtttatttatgaccaaagccgataaatgcgcgaaagaggcggatacggcagcgttttcccggcttaactggacaacgatgctcatcgtcgctagtgcgtatgcggtgattgctttcctctgtacttacctggcacagggggcgatgcaggcgctggtgaaagcgatgcccgcctggctgacccacggctttgaagtggctggcggtattctgcctgccgttggttttggcttgctgctgcgcgtaatgttcaaagcgcaatatatcccttacctgatcgccggtttcctgtttgtttgctacatccaggtcagcaacctgttgccggttgccgtactgggcgcaggctttgcggtgtatgagtttttcaatgcgaaatcccggcagcaagcgcaaccgcagcccgttgccagtaaaaatgaagaagaggactacagcaatgggatctgaaatcagtaaaaaagatatcacccgtctgggctttcgtagcagcctgctgcaagcgagctttaactacgaaaggatgcaggcgggcggttttacctgggcgatgttgccgatcctgaaaaagatttataaggacgacaaaccgggcttaagcgcggcgatgaaagataacctcgaatttattaatacccacccgaatctggtcggattcctgatggggttattaattagcatggaagaaaaaggagaaaaccgcgacaccattaaaggcctcaaagtggcactgtttggcccaatcgccgggattggcgatgcgattttctggtttactttgttgccgattatggcgggaatttgcagtagttttgccagccagggaaacctgctggggccgattctatttttcgccgtttacctgcttatctttttcctgcgcgtcggctggacccacgtcggttatagtgtcggcgtgaaggcgatcgataaagtgcgagagaacagccagatgattgcccgtagcgcaaccatcctcgggatcacggtaatcggcgggctgatcgctagctatgtgcatattaacgtggtgacaagctttgccatcgacaatacccacagcgttgcgctgcagcaggatttcttcgataaagtcttcccgaacattttaccgatggcctacaccctgctgatgtattacttcctgcgggtgaaaaaagcgcatccggtgctgttaatcggcgtgacttttgtgctctctattgtttgttccgcattcggcattttgtaaatggaacgaggcactgcgtctggtggtgcctctttacttaaggaatttcatcctgtgcaaacccttcagcaagttgaaaactatacggcgttaagtgaacgtgccagcgaatatttattggccgtgatccgtagcaaaccgaatgccgtgatttgcctggcgaccggagccacgccattactgacgtatcattatctggtagaaaaaatccaccagcagcaggttgatgtcagccagctcaccttcgtgaagctcgacgaatgggtggatctgccattaacgatgccaggcacctgcgaaactttcctgcaacagcatatcgtgcagccgctggggctacgtgaagaccagctcatcagctttcgctccgaagagataaatgagacagagtgcgaacgggtaacgaacctgattgcgcgcaaaggcggtctggatttatgcgttctcggattggggaaaaacggtcatcttgggctgaacgaaccgggagaaagcctgcaaccggcctgccatatcagtcaacttgatgccagaacacagcaacatgagatgttaaaaaccgcgggtcgccccgtgactcgtgggatcaccttaggcctgaaggatattctcaatgcccgcgaagttttgttactggtgactggcgaaggaaagcaggatgcgacagatcgttttctcacggctaaagtctctaccgctatcccggctagttttttatggctgcacagtaactttatttgtttaattaacacctaaccagatgaaaaatttgctcaaaatgtttaaattaacttatgtaacagtcacgcattatattaaataacatttgactgggttgaacataacgccgatagcaaaaggagttatgttcaacaatttaattttagatatacatataacttgttctattaataaatcacctcgtattctgactcgccccctggcgcagcaaagtcaggcatttatactcttttgaatacatagaaaattgatatcaatataatgaaaatatcaaatatttgcatataaatataatcttaaagttcagtctatttaatgttcaatgaaatatttctgcctgtataatctttaaagatgttgaacatatattcacattaaatatgattatgtacttgttacaaggataaggttatatatgaataaagttacaaaaacagctattgcgggcttacttgcgcttttcgcaggtaatgccgctgcaaccgatggtgaaatagtttttgatggcgagattttaaaatccgcttgtgaaatcaatgactctgataagaaaattgaagttgctcttggtcactataatgccgaacagtttcgtaatattggcgagcgtagcccaaaaattccattcactattcctttagttaactgcccaatgactgggtgggagcacgataacggcaacgttgaagcgtctttccgtctatggctggaaacgcgagataatggcaccgtccctaacttccctaatctggcaaaagtaggctcttttgctggcatagcggcaacaggtgtgggtatccgtattgacgatgcggaaagcggaaacattatgccactgaatgctatgggcaatgataacacggtttatcagatcccggcggaatccaatggtattgtcaatgttgacctcatcgcttactacgtaagtaccgtagttccaagtgaaatcaccccaggggaagcagacgctatcgttaacgtaacgctggattaccgttaatacgttagggcgttatctgacctgtcagataacgcccttttccttcctctttctcgttgtatcaggttgaaaaataactatgagtaaacgaacattcgcggtgatattaaccttgttgtgtagcttctgtattggccaggcgcttgcaggaggaatcgttttacagcgaacgcgagtgatctatgatgccagccgcaaagaggctgcgttacctgtcgcaaacaaaggcgcagaaacgccttatttactgcaaagttgggtagataatatagatggtaaaagccgtgccccatttattataaccccaccgctatttcgtcttgaggctggcgatgacagtagtctgcgaattattaaaacagctgataacctgcctgaaaataaagagagcctgttctacattaatgttcgtgccattccagcaaagaaaaaaagtgatgatgttaatgctaacgagttgacgctggtatttaaaacacggatcaaaatgttttatcgccccgcacacctgaagggacgggtaaacgatgcgtggaaaagtctggaatttaaacgtagtgaccatagtctcaatatatataacccaactgaatattacgtcgtatttgccggactggcagtcgataaaaccgatctcacaagcaaaattgaatatatcgcgcccggagaacataaacagttaccacttcctgcatctggcggaaagaacgtgaaatgggctgcgatcaatgattatggcggcagttccgggacagaaactcgtccactgcaataaaaaatataaaaacacaggtcatcagggaatgccacaacgacaccaccagggacataaacgcacaccgaaacagttggcgctcatcatcaaacgttgtttgccgatggtgctcactggcagcggcatgctttgcactaccgctaacgccgaagagtattatttcgaccccattatgctggaaaccacaaaaagtggtatgcaaacaaccgatctgagccgttttagtaaaaaatatgcacaactaccaggaacttatcaggttgatatctggctgaataaaaagaaggttagtcagaaaaaaattacatttaccgccaatgcagagcaacttctgcagccacagtttacggtagaacaactacgtgagctgggtattaaggtggatgaaatcccggcgctggctgaaaaagatgacgatagcgtgatcaacagccttgaacaaatcattcccggtacagctgctgaatttgatttcaatcatcagcaacttaatttgagcattccccaaattgcactgtaccgtgatgcaagaggttacgtctccccttctcgttgggacgatggtataccaacgctgtttaccaactacagctttacaggttctgataaccgttaccgccagggcaatcgtagccaacgacagtacctgaatatgcaaaatggtgctaattttggcccctggcgattacgcaactattccacatggacacgcaacgatcagacaagtagctggaataccatcagtagttatttacaacgtgatatcaaggcgttgaagtctcagttgcttctgggagaaagcgccaccagcggcagtattttttccagctacacctttactggcgtgcaactcgcttccgacgataatatgttgccaaacagccagcgcggatttgccccaacggtacgcggtatcgcaaacagtagtgcaatcgtgactatcaggcaaaatggttatgtgatctatcaaagcaacgtgagtgcgggtgcctttgaaattaacgatctctacccctcttccaacagcggcgatttagaagtcacgattgaagaaagtgacggtacacaacgtcgctttatccagccttattctagtttacccatgatgcagcgacctgggcatctaaagtatagcgcgaccgctggacgctatcgcgctgatgcaaacagtgatagcaaggaacccgaatttgctgaagccacggcaatatatggtttgaataatacttttacgctgtatggcggcctgctcggttctgaagattattatgcgctggggatcggtatcggcggcacacttggcgcactgggcgcgttgagcatggatatcaacagagctgacacccaattcgataaccagcactcttttcatggctatcaatggcgtacgcagtacatcaaagatatcccggaaaccaacaccaatatcgctgtcagctactatcgctataccaacgatggctattttagttttaatgaagccaatacccgcaattgggactataacagtcgccaaaaaagtgaaattcaattcaacatcagccagacaatatttgatggggtaagtctgtatgcctccggtagccagcaagactattggggcaataacgataaaaacaggaatatctctgttggggtttccggccagcaatggggagttggttacagcctgaattatcaatacagccgctacactgatcaaaataatgaccgcgcactctctttgaatctcagtattccgttagaacgctggttaccgcgtagccgggtttcctatcagatgaccagccagaaagatcgcccaacccaacatgaaatgcgtcttgatggcagtctgctggatgatggtcgcctgagctatagcctggaacaaagtctggatgacgataacaaccataacagtagcctgaacgccagttaccgtagtccttatggcaccttcagtgccggatacagctacggtaatgacagcagccaatacaattacggcgttaccggcggcgtggttatccatcctcatggcgtgacgctcagccaatatctgggcaacgcttttgcgcttatcgatgctaacggagcatctggcgtgaggatacaaaactatccggggattgctaccgatccttttggctatgcagtggttccttatctcacaacttatcaggaaaaccgtctcagcgtagatactacgcagctgcccgataacgtcgatcttgaacaaacaacacagtttgtggtgcccaacagaggtgcaatggtagcggcgcgtttcaacgccaatatcggttatcgcgtacttgttacagtcagcgatcgcaacggtaaaccgttgccctttggcgctcttgccagcaacgatgatacggggcaacaaagtatcgtcgatgagggcggcatactatatctctctgggataagcagtaaaagtcaaagctggactgtacgctggggaaatcaggcagatcaacaatgtcagtttgctttcagtacaccggatagtgaacctacaacctctgtattacaaggcacagcgcagtgccattaaggataaaaaaatgaaaagagcgcctcttataacaggtcttttgttgatatccacatcctgcgcttatgcctccagtggagggtgtggagccgacagcactagcggtgcgacaaattacagcagtgtggttgatgatgttacggtgaaccagacagataacgtgacaggacgggagtttacctctgcaacgctaagtagcactaactggcaatacgcctgttcctgctctgcgggtaaggcagttaaacttgtctatatggtcagccccgtacttaccaccactggacatcagacaggatattacaaactcaatgacagcctggatattaaaaccacattacaggcaaacgacattccaggactcacaaccgaccaggttgtctctgttaacacccgattcacacagataaaaaacaacacggtatattctgctgcaacccaaacgggtgtttgccagggtgatacgtctcgttatggacccgttaatattggtgcgaacaccacctttaccctgtatgtcaccaagccatttctcggcagcatgaccattccgaaaacggatattgccgtcattaaaggcgcgtgggtcgatggaatgggaagcccgtctacaggtgacttccatgatttagtcaagttaagcattcagggaaatctcaccgccccacagagctgcaaaattaatcagggcgatgttattaaggttaattttggattcatcaatggtcagaagtttaccacccgcaatgccatgccagacggttttactccagtagactttgatatcacttatgactgtggtgatactagtaagattaaaaacagcttgcaaatgcgcatcgacggtacaactggggtagtagaccagtacaacctggtcgccaggcgaagaagtagtgacaatgtgcccgatgtcggtattcgtattgaaaatctcggcggcggagttgcaaatattccttttcagaacggtatccttcccgttaatccttccgggcatggcaccgtcaatatgcgcgcctggccagttaatctggtcggtggtgagctggaaacaggaaaatttcagggcacagccaccattaccgtcatcgtgcggtaaaagaagacgttgcgttttgattaacgcaacgcttcggcactgttacccctgctgctccagcgcatacttatacagcgcatttttcttcacgccgtgaatttctgcggccagcgccgccgcttttttcagcggcagttctgcctgtagcagcgccagcgtgcgcagggcatcggcgggtaagtcttcttcctgtgctttatgaccttcgacaatcagcaccatttcgcctttgcgacggttttcatcttcctttacccacgccagcagctcgccaacgggcgcgccgtgaatggtttcccaggttttggtcagctcacgcgccagaaccacgtagcgggattcgcctaataccgcaacgatatcttccaggctatctaacagacggtgggtagattcataaaaaatcagcgtgcgcggctccgcttcaatggcttttagcgcatcacggcggcctttacttttggcaggtaaaaagccttcgtaacagaaacggtcagagggtaaacccgctgcgcttaacgcagtgatagcagcacacggcccgggtagcggcaccacgcggatccccgcttcacggcaggtacgcaccagatggtagccaggatcgttaattagcggcgttccggcatcggaaaccagcgcaatgttttgcccctcttgcagcttcgccagcagcgtttcagctttttgttgttcgttatggtcgtgcagcgcaaacaaccgggcattaatcccaaaatgttgcagcaataaaccggtgtgacgagtatcctcggcggcaatcagatcaacggcctgtaatacctctaacgcacgctgggtgatatccgccagattgccgattggcgtcggtacaatgtaaagctggccctgagaattatccgcgctttggtgttgtttcattgtgtcgtccgtattgccgatttaatattgagcattgcgtaaaaaaaatatcactggatacattatggtacccagtacattttctcgtttgaaagccgcgcgttgtctgcctgttgttctggcagccctgattttcgccggttgtggcacccatactcccgatcagtccactgcttatatgcagggcacggcgcaggctgattctgccttttatcttcagcagatgcagcaaagctctgatgataccaggatcaactggcaattactcgccattcgtgcactggtgaaagaaggtaaaaccgggcaggcggttgagttgtttaaccaactaccgcaagaactgaacgatgctcagcgtcgcgagaaaacactgctggcggtagagattaaactggcgcagaaagattttgctggcgcgcaaaacttgctggcgaaaatcacacctgccgatttagaacaaaaccagcaagcgcgttactggcaggcaaaaatcgatgccagccaggggcgtccttccattgatttactgcgcgcgttaattgctcaggaaccgctgcttggcgcgaaagaaaaacagcagaatattgatgccacctggcaggcgctctcctccatgactcaggaacaggcgaatacgctggtgatcaacgccgacgaaaatattctgcaaggctggctggatctgcagcgcgtctggtttgataaccgtaacgatcccgacatgatgaaagccgggatcgccgactggcagaaacgttatccgaacaatccgggcgcgaaaatgctgccaacgcagttggttaacgtaaaagcgtttaaaccagccagcaccaacaaaatcgccctgctgttgccactgaatggccaggcagcggtatttggtcgcactattcagcaaggctttgaagcggcgaaaaatatcggcactcagccagtggcagctcaggtagctgccgcacctgccgcagacgtagctgaacaacctcagccgcaaaccgtggatggcgttgccagcccggcacaagccagcgttagcgatctgaccggtgaacagcctgcagcccagccggtgcctgtaagcgccccggcgacaagcaccgcagcggtaagcgcacccgcaaatccatccgcagagctgaaaatctacgataccagtagtcaaccacttagccagatcttaagccaggttcagcaggatggcgcgagtattgtggtcggtccgttgctgaaaaataacgttgaagagttgctgaagagcaacactccgctgaacgtactggcactgaaccagccggagaatatcgaaaatcgcgtcaatatttgttacttcgcgcttagtccggaagacgaagcgcgcgatgcagcgcgtcatattcgtgaccagggtaaacaagcgccgctggtgctgatcccacgcagtagtttgggcgatcgcgtagccaatgcgtttgcgcaagagtggcagaaactgggcggcggcaccgttctgcaacaaaaatttggttccaccagcgaattacgcgcgggtgttaacggcggttctggtattgctttaacgggtagcccgattactctcagagcgacaaccgactccggcatgacgaccaacaatccaacgctgcaaaccacgccaaccgatgaccagttcaccaataatggcggtcgtgtcgatgcggtgtacattgtggcaacgccgggtgaaatcgcttttatcaaaccgatgatcgccatgcgtaacggtagccagagcggtgcaacgctgtacgccagctcccgcagtgcgcaagggaccgctggcccggatttccgactggagatggaaggcttgcagtacagcgaaatcccgatgctggcaggcggtaatctaccgttaatgcagcaggcactcagcgcggtgaataacgattatagtctggctcgcatgtatgcgatgggcgtcgatgcctggagcctggcaaatcatttcagtcaaatgcgccaggttcagggttttgaaatcaacggtaataccggaagcctgacggctaacccggattgcgtgattaacaggaacttaagttggctacagtaccaacaaggtcaggtagtccccgtcagttaaattaagtgattaacaggaacttatcatggctacagtaccaacaaggagtggtagtccccgtcagttaaccaccaaacagaccggcgatgcgtgggaagcacaagcgcgtcgctggctggaaggcaaaggactgcggtttatcgccgctaacgtgaacgagcgtggcggcgagatcgatctgataatgcgtgaaggccggaccaccatttttgtcgaggtacgctatcgccgctctgcgctttatggcggcgcggcagccagtgtgacccgcagcaaacaacacaaattattacagactgcccgcttgtggctcgcgcgtcataatgggagttttgatactgtggattgccggttcgatgtggtagccttcaccgggaatgaggttgagtggattaaggatgcctttaatgaccacagttaattaaggtttaaggattagcgtgcaagaaagaattaaagcttgcttcactgaaagcattcaaactcaaattgcggcggcagaggcgcttccggatgccatctcccgtgcagccatgacgctggttcagtctctgctcaatggcaacaaaatcctctgttgtggtaatggaacttccgctgccaatgcacagcattttgctgccagcatgatcaaccgtttcgaaacggagcggcccagcttacctgccattgcactaaatactgataatgttgtcttaacggcgattgccaacgatcgcttacatgatgaagtgtatgcaaaacaggtgcgggcgctgggtcatgcgggagatgtattgttagccatttccacccgtggcaacagccgcgatattgttaaagcagttgaagccgccgttacgcgtgatatgaccattgtggcattgaccggctatgacggcggcgaacttgcaggtttgttagggccacaggatgtggagatccgcattcctagccatcgtagtgctcgcattcaggaaatgcatatgctgacggtaaattgcctgtgcgatctgatcgataacacgcttttccctcaccaggatgattaaggagaatacatgaaggcattaagcccaatcgcagtccttatttccgcgctgctgttgcaaggttgtgttgccgctgccgtagtgggtaccgctgctgtgggtaccaaagccgcaactgacccacgcagtgtcggcacccaggtggacgatggtaccctggaagtgcgcgtgaacagcgcattgagcaaagacgaacagattaagaaagaagcgcgcattaatgtaacggcctatcagggcaaagtgctgctggttgggcagagtccaaatgctgaacttagcgctcgcgccaaacagattgctatgggcgtagacggtgccaacgaagtgtataacgagattcgtcagggccagccgattggtctgggcgaagcatctaacgatacgtggatcaccaccaaagtgcgtagccagctcttaaccagcgacctggtgaaaagctccaacgtgaaagtgaccaccgaaaacggtgaagtgttcctgatggggctggtgactgaacgtgaagcgaaagcggcggcagatattgccagccgggtgagcggcgtgaagcgggtaactacggcgtttacgtttattaaataacagccccttgtaatgcctgatgcgacgcttgccgcgtcttatcaggcctacaacgatacaaaccgtaggtcagataaggcgtttacgccgcatccgacatgttttccctcaaatcagaacaacagcgccagcccgccgacaatcacaccagacactgccaccatcgcccctgtcagccataaggctttcgccgggaacgctttgcgcagcataatcagactcggcaaactcactgccgggagcgtcatcaacaatgccagcgccggagcggttcccatacctgccagcatcatcgtttgtacaatcggaatttctgctgccgtgggaatgacaaacaagcatcctgctaccgccatcgccaccacccacatcaggctgttatcgacagcaccatcggcatgggggaataaccagacgcgagcggcacccaacaccagtactgcaaggatgtaaaccgggatcgtactccagaaaagcgtccatagcgccctgccccagcggctaaaaaacccgccctgtgcttccggtatgtcaatttcgaccggtgcctgcgtttgcggtgtttcacgcacccatttttgcaccagcgtcgcaatcagcaacaccatcaccagcccggccaccagacgaatcgccgcaaaaccccagccgaggacaaagcccataaacaccagcgtcgccgggtttaacaccggattgcccatccagaatgccagcgcaccgcccatgctcacctgttggcgacgcattcccgccgcgaccggagccgcacagcaggtacacatcatgcccggcaagctaaacagcgttcccagcagcgtgccgcgaaagcggctttgcccaagcgtacgcaacaaccagtcacgcgggatcagcacctgaatcaagctaccgaggatcacccccagcaccgccgctttccataccgcgaggaaatagatcatcgcgtaatccaacgccgcctgccatgggttagcatccgcctgcgcaaggatagatttaccgatactgtgggtttcggcagcagtaaacgctttgccgtagtaaggttcccatttcacataccagagaccggcaatgacaacgagaaagaaaagcgcgggtttccaccactgaatgggcgttgccgcctgagaactagactgaccagtcatagcattccccaggaataagttatgataattgagcgcgtgaatattacgctcactatcaattcttgggaataattattcagctcttttgcgtaattcactagagcttaaaatcgtcacgccttcatgctcaggccgcatgctctctgccagcatgacccgcgccacgtctctcgcatcaatggatttccagttacctggtaacaaacggaacagcggcgcaaaaagcgtttcgttcatccgctgtttgctacgatcgcccagtaacatgctcgggcgagcaatggtcaatttcggccagttctgggcgattaatgcttcttccatctcccctttgacgcggttatagaaaaacgggctgtgggcattggcacccatcgcactgactaccaacatatgctgcgcgcccagtcgccgcccggttaatgcggtatccactaccagcgtgtaatcggcatgaataaacgcctctttgctccccgcttctcgccgcgtggtgccgagacaacaaaacacaatgtcgatgggatcggtgacctgcgccaacgcgtcactcagttgcggatcatggggattaaacaccccgggcatatcgcccaacggacgtcgcgtcggcgcagcaatggcgttaactttcggttcgttaatcaacatccgcagcaggtgaccgcccaccagccccgttgcgcctgtaatcagtacctgactcatcttcgctcctttacagaattgtctgccttgcgctccacggctcatgcaccaggcttaatagaccatgaggtaattatccccgattgtgggaaattcgcctcatccaatgcaacaacgcggaggaagcatgagtaagaaaattgccgttttaatcactgatgaatttgaggatagtgaatttactagtcccgcagacgagttccgtaaagccggacacgaagtgattaccattgaaaaacaagcgggtaaaacggtgaaaggcaaaaaaggagaagccagcgtgaccatcgataaatccatcgatgaagtgacgcctgcggagtttgatgccctgctgctaccgggcggccatagtccggattatctgcgtggggacaaccgttttgtcacctttacccgtgattttgtgaatagtggcaaaccggtgtttgccatctgtcacggcccgcagttgctgatcagcgccgatgtgattcgggggcgcaaactgaccgcagttaaaccgatcattattgatgttaaaaatgcgggcgcggaattttacgatcaggaagtcgtggttgataaagatcagctggttaccagccggacaccggacgatctgccagcgtttaaccgcgaggcgttacgcctgctcggtgcctgattacgcctgctcggtgccactgtcgcgtagccaaatcatttttttaccaaagcccagcgtgttgtcggtgaatttgatttcatcgagccggatttcccacaccggggcgctcagcattctggcaaccggaaagcgacgattgtacgccttgcgcgcgaggtcgctttcctcaccttccagcctgcggatctcacctttaaactgcacaccgcgaattaacgctaccgttttcggctgaccgtttaccgttccggcaaccgcagcctgcggcccactcatctgcgcgtggcgcgttttttcttccgtcaaaatgtagaaggcgactttctgcgcatcaaaaagataaaaggcattagcgcaccagagttccccttcctgctgcacacaccaagtgacaacatgttgttttgccagccaacggctgatggcgatgagtgtttccattgctgttctcttttatactgtgggcctgaccttaacatgcgacgcagacgatgacaccctggtttctttacttgatccgtaccgccgacaataagctttataccgggatcaccacggatgtcgaacgccgctatcagcagcaccaaagcggcaaaggggcgaaagcactgcgcgggaaaggagaactaacgctggtgttttccgcgccagtgggcgatcgtagcctggcgttacgggcggaatatcgcgttaagcaactgaccaaacggcaaaaagagcgtctggtagcggaaggcgcagggtttgcagagctgttaagcagtctgcaaaccccggagattaaaagcgattgaaatgctcgtgatactcaaccaggccggtaacgccattcagcgcgtcatccgctaaacgatgtacctggaaggcgctttcagtgcccggccagcggcaacgcagatcgtgatgcgccgccagttcaaagccgaaacgactgtacagcgccggatcgcccagcgtcaccactgcggcatagccgaactcattaaggctatcgagtccttcatagaccagttggcgtgccagcccctgtccacggtatttttcatcaaccgccaacggtgccatgccgacccattgcaggtcttcgccctgcacatcaaccggactaaatgccacatagccaatgacctgaccttcgtcatctgtcgccaccagccccagcgtcagaaagccatcttcacgcagatcgtgaaccagcttcgcttccgcatcactttcgaaactgcgacgcagcagggcatcaatacccggcgcatcaatgggaatttctactcgaattagcatggttcacctacgcttgtctgtttggtttcaggcgcggttttcattcccgcctcaacaaaatccgccagttgcagcagcatcatgcgtaaggctttcggcatttgctccagttcaatggcgtccatcaggtttttcacatacagccccagctccgtatcgccttcaatcaccagccgacgctggaagaagagcgtatccggatcttgtttacgcgccgcaatcatcagcagatcgctggcgtcggcactaaaactcacatcagcttgcgcgttctggctaacgaccagtttgccattcaccacgctggtaaaccattgcaggtcaatatcacgcacatgaatacttaaccagcggccttcaagaaactccagctcgccatcatccagcgcctggcggaattgccagcttaagacctgctcaagaacctggcgttttagcgcaaatggcgtcagttttaccggtacactcaacagagatggccccaaatgcacaatacgggaacgcagtttatccaacacgagttttactccctgtttcaacaatcatcctattttgccatatcagaaaaataacatagcggtataaatcaacaattccatatgaaattgctgctaccaccaatacaactttaactgccttaaatcaaaaattgtcgcagcaaggttaactaaaatcccagttcgttaacatttttgcgttttgatagcgcaaccttcaggaaaaattatggagctgctctgccctgccggaaatctcccggcgcttaaggcggccatcgaaaacggcgcagatgctgtttatatcgggctaaaagatgataccaatgcccgtcacttcgccggccttaactttaccgagaaaaaattgcaggaagcggtgagttttgtccatcaacatcgccgcaaacttcacatcgcgattaacacttttgcgcatccggacggttacgcccgttggcagcgcgccgtggatatggcggcgcagctgggtgccgacgcgctgatcctcgccgacctcgccatgctggagtacgccgccgagcgttatccgcatattgagcgccacgtaagcgtgcaggctagcgcgaccaatgaagaggcgattaacttttatcatcgccattttgacgttgctcgcgtggtgctgccgcgcgtgttgagcattcatcaggtgaaacaactggcacgggtcacacctgtaccactggaagtctttgctttcggcagcctgtgcattatgagcgaaggtcgttgctatctgagcagctatctgacgggtgagagccccaacaccataggcgcgtgttctccggcccgtttcgtgcgctggcaacaaacgccgcaggggctggaatcccgcctgaacgaagtgctgatcgaccgttatcaggacggcgaaaacgcaggttatccgacgctatgtaaagggcgttatctggtggacggcgagcgctatcacgcgctggaagaaccaaccagtctcaataccctggaactgctgccggagttaatggcggcgaatattgctagcgtgaaaattgaaggccgccagcgtagcccggcgtatgtcagccaggtggcgaaagtctggcgtcaggctatcgaccgttgtaaggccgatccgcaaaactttgtaccgcaaagcgcgtggatggagacgctcgggagcatgtccgaaggcacgcaaaccactcttggcgcatatcaccgtaaatggcagtgagaaaagcaatgaaatattccttagggccagtgctgtggtactggccaaaagagacgctggaagaattttatcagcaggccgccaccagcagcgccgacgtgatttatcttggtgaagcggtatgcagcaagcgtcgggcaaccaaagttggcgactggctggagatggcaaaaagcctcgccgggagtggtaagcagattgtgctctccacgctggcgctggtgcaggcaagttctgaactgggcgaactgaaacgctatgttgagaacggtgagtttctgattgaagccagcgatctcggcgtggtgaatatgtgcgctgaacgcaaactgccgttcgtcgccgggcacgcgctgaactgctacaacgcggtgacactgaaaatattgctcaaacagggcatgatgcgctggtgtatgccagtggagctttcccgcgactggctggtgaatctgcttaatcagtgcgatgagctgggcattcgtaaccagtttgaagtggaagtcctgagctacggtcatctgccgctggcctactccgcccgctgctttaccgcgcgtagcgaagaccgcccgaaagatgagtgtgaaacctgctgcattaagtatccgaacgggcgcaacgtgctgagccaggaaaaccaacaagtgtttgtactcaatggcattcagaccatgagcggctacgtttacaacctcggtaacgagctggcatccatgcagggcctggttgatgtggtccgcctgagtccgcagggtactgacactttcgcgatgctcgacgccttccgcgctaatgaaaatggcgctgcaccactgccgttgacggcgaacagcgactgtaacggctactggcggcggctggcaggactggagctgcaagcctaagtaaatagctcactttgttaacaactttaactactctttaatgcagtattaaagattaatcggtaacaaagtgagctgttatgactgataaaaccattgcgtttagcctactcgatctggcccccattcccgaaggttctagtgcgcgagaagcattctcccactctctcgatctcgcccgtctggctgaaaagcgcggctatcatcgctactggctggcagaacaccacaatatgactggcattgccagtgctgccacgagcgtattgatcggctatctggcggcgaataccaccacgctgcatctggggtctggcggcgtgatgttgcctaaccacagtccgttggtcattgcagaacagttcggcacgcttaatacactctatccggggcgaatcgatttggggctgggtcgtgctccgggtagtgaccaacggacaatgatggcgctacgtcgtcatatgagcggcgatattgataatttcctccgcgatgtggcggagctggtggactggtttgacgcccgcgatcccaatccgcatgtgcgcccggtaccaggctatggcgagaaaatccccgtgtggttgttaggctccagcctttacagcgcgcaactggcggcgcagcttggtctgccgtttgcgtttgccagtcacttcgcgccggatatgctgttccaggcgctgcatctttatcgcagcaacttcaaaccgagtgcacggctggaaaaaccatacgcgatggtgtgcatcaatattatcgccgccgacagcaaccgcgacgctgaatttctgtttaccagtatgcagcaagcctttgtgaagctgcgccgtggcgaaaccgggcaactgccgccgccgattcaaaatatggatcagttctggagtccgtctgagcagtatggcgtgcagcaggcgctgagtatgagcttggtaggtgataaagcgaaagtgcgtcatggcttgcagagcatcctgcgcgaaaccgacgccgatgagattatggtcaacgggcagattttcgaccaccaggcgcggctgcatagctttgagctggcgatggatgttaaggaagagttgttgggataatgtgtcttaacgcgggaagccttatccgagctggcaacgctgtcctacatagacctgataagcgaagcgcatcaggcattgtgtaggcagcagaaatgtcggataaggcaccgctgattactgatacaccggcagtaaattaaagctgcttaaaatatgcaccagtgcgttgccgacgccaaacaccagaatcagcgcaatcatcggcttgccaccccagacgcggaatttcgggctgccaaagcgtttacggcttgcacgggctaacagcgccggaacaattgccgcccagatggtagccgctaaaccagcataaccaatggcgtacaggaatccgttcgggaacaacagcccccccacaactggcggggcaaaggtcagcaatgccgttttcaagcggcccacagcgctgtcgtcgaaaccaaacagatctgccagatagtcaaacaaacccagcgttacgccgaggaagctactcgctaccgcaaagttactgaacacgaccagcagcagatccagactacggctgttcagtacgccgcttaacgcctgtaccagcacatcaatattaccgcccttctctgcaataccgataaactccggacgcgggatgttacccatcgtcgccagcaaccagatggtatacagcgccagcgccatcagcgtaccgtacaccagatatttcacgatggttttcggatctttgccgtaatacttcatcaggcttggcacgttaccgtgataaccaaagcttgccagacagaacggcagggtcatcaacagatacggtgcataagacgcattgctttcggcgacgttgaacaatgtcgcaggctgcacatgccccagcaggctaccaaaggtgaggaagaaggtaatgactttcgcccccagcacaatcgctgtcatgcgactgacggctttagtgctcaaccacaccacaaacgctaccagcaatgcaaaaccaaaacccgccgcccgtgccgggacgtttagactcatctctgcgaaggtgtgatgcagaatgctaccactggcagaaatataggcataggtcaggatatagagcacaaaggcaatggaaatgccgttgaccacgttccagcctttgcccagcaaatctttggtgatggtgtcaaaactgctaccgattctgtaattcaggttagcttccagaatcatcaagccggaatgcagcatacagaaccaggtaaagatcagcgccgccatactccagaaaaaccacgccccggacatgaccactggcagagaaaacatccctgcgccaataatggtgccgccgataatcaccacgccgccaagcaggctcggactcgtttgggtggtggttagtgttgccatgagggcttctctccagtgaaaaatagtgcgactgcgttgttatgcattgcactgtaccagtacacgagtacaaaagacagaaaaaaagccccgatggtaaaaatcggggctgtatatattattttacagattgtgttcgctgttcagcgatgattacgcatcaccaccgaaacgacgacgaccggtagaatcatcacgacgcggagcgcggccttcacgacgttcgccgctaaaacgacgaccatcaccacggccaccttcacggcgttcaccgctgaagttacgaccgccttcacgacgttcgccaccgaaaccacgaccaccgccacgacgctcaccgccagtatgcggctgtgcatcgcccagtaactgcatgttcatcggcttgttgagaatgcgagtgcgcgtaaagtgttgcagcacttcacccggcatacctttcggcagttcgatggtggagtgagaagcaaacagcttgatgttaccaatgtaacggctgctgatgtcgccttcgttagcaatcgcaccaacgatatgacgaacttcaacaccatcatcgcggcccacttcaatgcggtacagctgcatatcgccaacatcacgacgttcacgacgcggacgatcttcacggtcaccacgcgggccacggtcgttacgatcgcgcggaccacggtcatcacggtcacggaattcacgtttcggacgcatcggcgcatctggcggtacgatcagagtacgttcaccctgtgccattttcagcagtgccgcagccagagtttcgagatccagctcttcaccttcagcagtcggctgaattttgctcagcagtgcgcggtattgatccagatcgctgctttccagctgctgctgtactttagcggcgaatttttccagacggcgtttgcctagcagttctgcgttcggcagttctacttccggaatagtcagcttcatagtacgttcaatgttgcgcagcagacgacgctcgcggttctcaacgaacagcagcgcgcggccagcacgacccgcacgaccggtacgaccgatacggtgaacgtaagactcagaatccatcgggatatcgtagttaactaccaggctgatacgctcaacgtccaggccacgggctgcaacgtcggtcgcaatcaggatgtccagacgaccatctttcaggcgttccagtgtctgttcacgcagcgcctggttcatgtcaccgttcagcgcggcgctgttgtagccgttacgctcaagagcttcagccacttccagagtcgcgtttttggtacgaacgaagataatcgccgcatcaaaatcttccgcttccaggaaacgtaccagtgcttcgtttttgcgcataccccagacagtccagtagctctggctgatgtcaggacgggtagtcacgctggactgaatgcgcacttcctgcggctctttcataaagcggcgggtaatgcgacgaatcgcttccggcatggttgcagagaacagagcggtctgatgaccttccgggatctgcgccataatggtttcaacgtcttcgatgaagcccatgcgcagcatttcgtcagcttcatccagaaccagaccgctcagtttagagaggtccagagtgccacgtttcaggtggtccagcagacggcccggagtaccgacaacgatctgcggcccctgacgcagggcgcgtaattgcacgtcataacgctggccgccgtacagagcaaccacatttacgccgcgcatgtgtttagagaaatccgtcattgcttcagcaacctgtaccgccagttcgcgggtcggtgccagcaccagaatctgtggtgctttcagctcaggatcaagattctgcaacagaggtaaagagaatgctgcagtttttccgctccccgtctgggccatacccagaacgtcgcggccattcagcagatgtggaatacactctgcctgaattggagatggtttttcgtaacccagatcgttaagggcttcaaggataggagccttcaggcccagatctgcaaaagtggtttcgaattcagccatgtagtacgtgtgcctcaaaattaatggcggccagtctacataactcatcatgaaattgatcagcaattttcattgaaaagtgtgaaccggctcaaagtaggtgtattaacgaacaacaacgccctcacccgttaaggtgatggcaatcaaaaaagattacgggctgatgtgtacgtcagttattgctggtcgctttctgccaggtcatcttggtcctggcccaggaggcttaattccaacaatgcgtatcggtgctcaacaaagttatgaacgttgttggcaaccgccagtttgaacagtgccgtggcgctgtccaaatcccccagacttaggtagtacttacctaaatagaagttggtttcactgagatgctcagcgaggctggtgttatccgttgcgtccgccttgagcctttccattaacgtttgttcgctaatgttgcccaggtagaactcgacaatgttccatccccactgttccttatcgcttttttcgaagtgctgtttcaacacttctttagcctgcttctcatcgagcttctgctcggcgagataaagccacagactacggaaaggatcattgggatcgtcttgataaaacgccagcagatcatcttgcgctaacttgtcacgaccgccgtaatataatgcgatcccgcgattcaagtgcgcgtagttgtaagttggatcaagctcaagtacagaatcaaacgcttcataggcagcatcaaaattgcctgcctgcgttaaatatatgcctaagtaattgaatacttcaggcatatccggtcggattgccagcgcttggctaaaatcgttacgcgctaatgccctcagaccgagactatcatacaacactccgcgctcatataaaagctgtgcgcgttcgtcatcggttaaagcccgactggcaaggatttgttccatacgtgccagaatcacttcctgctgtaaagtcggttgcaatggtaccgcgaggacttcacttttacgccaggaagtattactgcatcctgcaagcgtaagtgctgtcgcaacgaaacaccagcgcaaaaaaggcttcatttcccactcccgaagaccacggttgaatgaacgtcctgttcccggttgctaacaaggcgtcctgcccggttaaaagccccccgccgcagcggagggcaaatggcaaccttactcgccctgttcagcagccggagcttccggtgctgcagcaggttgagactgctcagtcgcttctttaatgctcagacggatacggccctggcgatcaacttccagaactttcaccggtacttcctgacccatctgcaggtaatcggtcactttctcaacgcgtttgtcagcgatttgagagatgtggaccagaccttctttaccgccgccgatggcaacaaatgcgccaaagtcaacgatacgggtcactttaccagtgtagacgcggcccacttcgatttctgcagtgatctcttcgatacgacgaatagcatgtttcgctttctcgccgtcggtcgctgcaatcttcacagtaccgtcatcttcgatttcgatggtggtgccagtttcttcggtcagagcacggattacagaaccgcctttaccgataacatctttgatcttgtccgggttgatcttgatggtatggatacgcggtgcgaactcagagatatcgccacgcggcgcgttgatcgcctgttccattacgcccaggatatgcagacgcgcacctttagcctggttcagcgcaacctgcatgatctctttggtgataccttcaattttgatatccatctgcagtgcagagataccgtcgcgggaacctgcaactttgaagtccatatcgcccaggtgatcttcgtcgcccaaaatgtcagacagtacaacgtagttgtcgccttctttcaccagacccattgcgatacccgcaacggcagctttgatcggcacacctgcgtccatcagcgccagagacgcgccgcacacggaagccatagaagaggaaccgttggattcagtgatttcagacacaacacgtacggtgtacgggaatttgtccatatccggcatgactgccagcacgccgcgcttcgccagacgaccgtgaccaatttcacgacgcttcggagaaccgaccatgccggtttcgcctacggagtacggagggaagttgtagtggaacaggaaggtatcggtacgttcgcccatcagttcatcaagaacctgcgcgtcacgagcagtacccagcgttgcggtaaccagcgcctgcgtttcaccacgggtgaacagcgcagaaccgtgagtacgcggcagcacgccagtacgcacatccagaccacggatcatatctttttcacgaccgtcgatacgcggttcgcctgccagtacgcggctacgaacaacgtttttctcgatcgcgtgcagaatttcacccagttcgttttcgtccagggtttcgtcttcagcaagcagcgtcgcgatggtttcagatttgatgacatcaacctgcgcataacgctcttgtttgtcggtgatgcggtaagcatcgctcaggcgagcttcagccagtgcagcaacgcgcgcgtttagcgcttcgtttaccggctccggctgccagtcccaacgcggtttaccggcttctttcaccagttcattgatgttctgaataacaacctgctgttgttcatgaccgaacactactgcgcccagcatctggtcttcgctcagcagttgagcttcagattcaaccatcagtacagcggcttcagtaccggcaacaaccagatccagtttgctctctttcagctcgtcctgagtcgggttcagtacgtactggtcattgatgtaacctacgcgggcagcaccaatcgggccattgaacggaataccagacagagacagcgctgcggaagcaccaatcatcgcgacgatatccgggttaacttgcgggttaacagaaaccacggtggcgataacctgaacttcgttgacgaagccttccgggaacagcgggcgaatcgggcggtcaatcagacgcgcgatcagggtttcgccttcgcttgggcggccttcacgacggaagaagctacccgggatacgaccagcagcgtaggtacgctcctgatagttaacggtcagtgggaagaagtcctgacctggtttggcttttttctggccaacaacggtaacgaataccgcggtgtcatccatgctaaccataacagcggcagtagcctgacgagccatcatgccggtttccagagtcacggtgtgttggccgtactggaatttacgaacgatcggattaagcaatgtaatatcctttctctttcttagacagtaccttacggcactggtgttaataccgcttcttctgcgcatcctcgcgactaatgacaaccctaacccagctctatgtgggtaaagcctctcattagccgcgcgaacctctgcaacggaagatcattcatagcaacaatacattagtttccagtgaattgctgccgtcagcttgaaaaaaggggccactcaggcccccttttctgaaactcgcaagaattagcgacgcagacccaggcgctcgatgagctgggtgtaacgtgctacgtctttacgtttcaggtagtcgagcagtttacgacgctgagaaaccatgcgcagcagaccacgacggctgtggtgatcttttttgtgctctgcaaagtggccctgcaggtggttgatctgtgcagtcagcagtgctacctgaacttcggtagaaccggtgtcgtttgcgtcacgaccaaactcagaaacgattttagctgttgcttcagtacttagagacattttaaaactccaaagtatatagaatgaaaggacgccgatctctaattcagcgatcccagtgtacgttacgcaaagtgttaaacaatttacgcgacgttaagcggcagtattctactcgtagcgacctgttatcgcaagacggttaacattacgccgggtattcaaccaccaggcgacgaggcgcaacgcggccttcatcgtcaatttcgcccataccgataaatttgccgttctcaccttccgtgacgcgaaccagtccttccagtggcgcaccagatgtacgaaccgggttaccatttttgaagtaaacagaagacgttaacggaagattcaccaccggatagtcgctagctggactgtccattggcatcagtaatggatcaagtaactccgcggctggaatatcctgctgttcagcttgctcaacaagttcacgcaggtgctccagggtcaccatccgttcaaccggatatttacttaccgccagacggcgcaggtaaataacatgcgcgccacagccgagtttttcacccaggtcatcaatgatggtgcggatataagtgcctttactgcagtgaatttccagctccagctcattgccttcatggcgaataaacagcaattcataaacggtaatcggacgcgcttcacgcggaacttcaatgccctgacgcgcatattcgtacagttttttgccctgatatttcagtgcactatacatgctagggatctgttcgatatcgccacggaaagtatccagtgccgctgccagctgctctgcgctaaaggttaccggacgttcttcaacgatctgtccgtcggcatcagaagtatcggtacgctgtccaagacgcgcaatgacccgatagcgtttgtcggagtccagcagatactgggaaaacttcgtcgcttccccgaggcaaatcggcaacatgccggtcgccagcgggtccagcgcaccggtatgcccggcacggttggcgttatatatacgtttcactttttgcagcgcatcgttgctggacataccctgaggtttatccagcaacaaaacgccgttaatgtcgcgaccgcgacgacgaggacgactcattagtcctccttgctgtcgtccgggttaacacgacgttcttcgtcatgtttgaccacgctggtcaccaggttactcatgcgcatcccttcaaccagagagttgtcgtagaagaaggtcagttccggcacgatacgcaggcgcatcgctttccccagcaggctgcggatgaaaccagaagcttcttgcaacgctttgatgcccgctttaaccgcgtcttcatctttgtcgttgaggaacgtcacatatactttggcatacgccaggtcgcgagacatttcgacaccggaaacggtggtcatcatgcccaggcgaggatctttaatttcacgctgcaggatgagagcgatctctttttgcatttcctgcgctacgcgctgcgggcgaccaaattctttcgccataataaattctcctgacaaaaaaggggctgttagcccctttttaaaattaatttcaggtggaagggctgttcacgttgacctgataagacgcgccagcgtcacatcaggcaatccatgccggatgcagcgtaaacgccttatcccgcatggaaccctaaaaaccttaagcaatggtacgttggatctcgatgatttcgaatacttcgatcacatcgccagtgcggacgtcgttgtagttcttaacgccgataccacattccataccgttacggacttcgttaacgtcatctttgaagcggcgcagggactccagctcgccttcgtggataaccacgttgtcacgcagaacgcggatcgggttgtgacgtttaaccacaccttcggtaaccatacagcctgcgatggcaccaaatttcgggcttttgaacacgtcacgaacttccgccagaccgataatctgctgtttcagttccggagacagcataccgctcatcgccgctttcacttcgtcaatcaggttatagatgacggagtagtaacgcagatccaggctttccgcttcaatcactttacgtgcagaggcatcagcacgtacgttaaagccaaccaggatggcgttggacgccgcagccagggtggcgtcggtttcggtgataccacctacgccagaaccgatgatcttcactttaacttcgtcagtagacagtttcagcaaggagtcggagatcgcttcgacagaaccctgtacgtctgccttcaggacgatattcacttcgtgaacttcgccttcggtcatgttggcgaacatgttctcgagtttagatttctgctgacgcgccagtttaacttcgcggaatttaccctgacgatagagtgcaacttcacgcgctttcttctcgtcacgtacaacggtaacttcatcacccgcagccggtacgccggacaggccgaggatttccaccggaatggacggacccgcttccagcacttcctgacccagttcgttacgcatcgcacgaacacgaccgtattcgaagccacacagaacgatatcgcccttgtgcagagtaccttcacgtaccagaacggtagcaaccggaccacgacctttatcgaggaaggattcgataaccgcaccgctcgccatacctttacgtaccgctttcagctccagaacttccgcctgcagcaggatagcgtccagcagttcatcgataccggtacccgctttcgcagatacgtgtacgaactggctttcaccgccccactcttccggcaggatgccgtactgggagagttcgttcttaacgcgatccggatcagcttctggtttatcgatcttgttcactgcaaccaccaccggtacctgcgccgctttcgcgtgctggattgcttcgatggtctgcggcatcacaccgtcgtcggcagcaacaaccaggactacgatgtccgttgcctgcgcaccacgagcacgcatactagtaaacgcggcgtgccccggggtgtccaggaaggtgatcatgccgttttcagtttcaacgtggtatgcaccaatgtgctgggtaatgccgcccgcttcgccagaggccactttcgtactacgaatgtagtccagcagagaggttttaccgtggtcaacgtgacccatgatggtcacaaccggcgcgcgcggttcagccgcagcacccgtgtcacggtcgctcattaccgcctcttccagctcgttttcacgacgcaggataactttatggcccatctcttcagcaaccagctgtgcggtttcctgatcgataacctggttgatggttgccattgcgcccagtttcatcatcgctttgatgacctgagagcctttaaccgccatcttgttcgccagttcgccaacggtgatagtttcgccgatcacaacgtcacggttaacggcctgagcaggcttctggaagccttgctgcaggctagaacctttacgttttccgcctttaccgccacgtactgctgcgcgtgcttcttcacgatcagctttactttcagcgtgtttgttgcctttcttcggacgcgctgctttcgcgttacgaccacggccacggccgccttcgacttcacgatcgctttcgtcttctgcctggcgagcatgttgagaagtagtgacgtgataatcgctggaatcttcagtcggttccgcgttatcagtccatttgttttcttccgccatacgacgtgcttcttcagcaacgcgacgtgcttcttcttcgagtttacgacgcgcttcttcttcagctttacgcttgagctctgcagcttcctgctcacggcgggctttttcagcctgggcgtttttagtcatatcgtcttgttgattgctcactttgtctttttccgcagcttcacgtttcgcttgttcagcagcttcacgcttagcttgttctgcggcctcacgttcagctttttgttgcgcctcgcgtttagcgctttcttctgcctcacgacgggcttgctcttccgcttcacgctgcgcttgctcttccgctgcaaggcgttcagcctcttgcggatcgcgtttcacaaaggtgcgtttcttgcggacttcgatttgtacgcttttgctttttccaccggtaccaggaatgttaagggtgctgcgtgttttacgttgcagcgtcaatttgtccgggccactatttttctgattcaggtggtcaatcaaagtctgtttctcttgtgcagacacagagtcgtcagcagacttccggatacctgcatcagcaaattgctgtaccaggcgttccacggaggtctgtcgctctgcggccagcgttttaatcgttacatctgtcatgctgttccttcctgctacagtttattacgcttcgtcaccgaaccagcaaatattacgggcagccataatcagtgctccggctttttcgtcggtcaacccttcgatatcagccagatcatcaatgccctgttcggcgagatcttccagcgtacaaacgccacgggcggccagtttgaatgccaaatcacgatctaccccttcaaggttcagcagatcgtcagccggtttgttatcaccgaggctttcttcctgggcctgtgcaatggtggccagtgcatttttagcacgctcgcgcagtgcttcaacggtcggctcatcaaggccttcgatttccaacagctctttcatcggcacataggccaattcttccagcgtgctgaagccttcttctaccagaacagtcgcgaagtcttcgtcgatgtcgagatatttggtgaaggtgtcgatcgctgcgtgcgcttccgcctgatgcttagcctgcaggtcgtcaacggtcatcacgttgagttcccaaccgctcagctggctagccagacgcacgttctgaccgttacggccaatcgcctgcgccaggttaccggcttcaacggcgatatccatggtgtgtttatcttcatccaccacgatagaagcaacgtctgccggtgccattgcgttaatcacgaactgcgccgggttatcatcccacaggacgatatcgatacgctcgccacccagttcagtagacaccgcctgaacacgcgcgccacgcatacctacgcaagcacctaccggatcgatacgtttatcgttggttttcaccgcgattttcgcacgagaacccggatcgcgagccgctgctttaatttcaatcacttcttcgccgatttctggcacttcaatacggaacagttcgatcagcatttccggcttggaacgagtgacgaacagttgcgcgccacgcgcttccgggcgaacggaatagagcacgccacgaacgcggtcgccagggcggaagttttcacgcggcagcatatcttcgcgcaggatcacggcttcagcgttgttgcccagatccagagagatgttgtcgcggtttacttttttcaccacgccggtgatgatttcaccttcgtgttcacggaactgatcaaccaccatcgcacgttcggcttcacgcactttctgcacgataacctgttttgccgtctgggtagtgatacggtcaaaggtaacagactcaatctgatcttcaacgtaatcgcccaggttcaggctttcatcttcataacgtgcggcttcaagggtgatttccttggtcggctgggtgacttcatcaacaactaaccagcgacggaaagtgtcaaaatcaccgcttttgcgatcgatctgtacgcggacgtcgatctcttgttcatattttttctttgttgctgtcgccagcgcgctttccaatgcttcgaaaatcttctcgcgaggtagcgccttttcattggatacggcttcaactacagccaaaatttctttgttcatcgcgggcttttcacctcatccagactattaaaagtggggaaccaggttcgccttctggatattactcagcgcgaacacttcatctttaccttcgacggtaactgtgatcatttcaccgtctaccgctttgataacgccctgccatttacgacggttttgtaccgccatacggagaaccagagtcacctcttctccgacaaaacgggcgtagtgttcagccgtgaacagtgggcgatcgagacccggactggagacttccaggttataagcaacggtgatgggatcttcaacatccagcacagcacttacctggtggctcacatcagcacaatcatcaacattgatgccatcttcactatcaatatagatgcgcagtgtggatgtgcgaccgcgaataaattcgatgccaaccagttcaaaacccagggcctcaactggcgcagtaatcatctctgttaatttttgctctaatgtggacaagcccacccccaagacataaaaaaagggcctaaagcccagttattctgtagtcagataacaaaaaaccccgataaatcggggctttatataactgaaccctataaccgcaactgcggtctggagcactttccagaaggattttttcaaatcccactacgaaggccgaagtcttcacagtatatttgaaaaaggactctaagggaaagtggttgcgggggccggatttgaaccgacgatcttcgggttatgagcccgacgagctaccaggctgctccaccccgcgcctgaaacgtggcaaattctactcgttttgggtaaaaaatgcaaatactgctgggatttggtgtaccgagacgggacgtaaaatctgcaggcattatagtgatccacgccacattttgtcaacgtttattgctaatcatgtgaatgaatatccagttcactttcatttgttgaatacttttgccttctcctgctctcccttaagcgcattattttacaaaaaacacactaaactcttcctgtctccgataaaagatgattaaatgaaaactcatttattttgcataaaaattcagtgagagcggaaatccaggctcatcatcagttaattaagcagggtgttattttatgacgacgattctcaagcatctcccggtaggtcaacgtattggtatcgctttttctggcggtctggacaccagtgccgcactgctgtggatgcgacaaaagggagcggttccttatgcatatactgcaaacctgggccagccagacgaagaggattatgatgcgatccctcgtcgtgccatggaatacggcgcggagaacgcacgtctgatcgactgccgcaaacaactggtggccgaaggtattgccgctattcagtgtggcgcatttcataacaccaccggcggcctgacctatttcaacacgacgccgctgggccgcgccgtgactggtaccatgctggttgctgcgatgaaagaagatggcgtgaatatctggggtgacggtagcacctacaaaggaaacgatatcgaacgtttctatcgttatggtctgctgaccaatgctgaactgcagatttacaaaccgtggcttgatactgactttattgatgaactgggcggccgtcatgagatgtctgaatttatgattgcctgcggtttcgactacaaaatgtctgtcgaaaaagcctactccacagactccaacatgcttggtgcaacgcatgaagcgaaggatctggaatacctcaactccagcgtcaaaatcgtcaacccgattatgggcgtgaaattctgggatgagagcgtgaagatcccggcagaagaagtcacagtacgctttgaacaaggtcatccggtggcgctgaacggtaaaacctttagcgacgacgtagaaatgatgctggaagctaaccgcatcggcggtcgtcacggcctgggcatgagcgaccagattgaaaaccgtatcatcgaagcgaaaagccgtggtatttacgaagctccggggatggcactgctgcacattgcgtatgaacgcctgttgaccggtattcacaacgaagacaccattgagcagtatcacgcgcatggtcgtcagttgggccgtctgctgtaccaggggcgttggtttgactcccaggcgctgatgctgcgtgactctctgcaacgctgggttgccagccagatcactggtgaagttaccctggagctgcgccgtgggaacgattatagtatcctgaataccgtcagtgagaacctgacctacaagccagagcgtctgacgatggaaaaaggcgacagcgtgttcagcccagatgatcgtattggtcaattgaccatgcgtaacctggatatcactgatacccgcgagaaacttttcggttatgccaaaactggcctgctttcctcctctgccgctagtggcgtgccgcaggtggagaatctggaaaacaaaggccagtaattcgacatcaaccctgcccttcaggggtggggttaccttgcttatcctctgtaaactcctttctgagcatcacataatcgaaaacatcatggtttgcatccacaacccgactgtctcctttatagtgtgcaatcacttcctcaagcgtttgcggctgttccggctttgttacccccatccacgcattaataaggtaattattgtaagctgtgctaaagatgttgttttccgttgtgcgatccacgccatccccaagaacggggctataccagataaacatcgggacatgatatgcctgctggctagcctccctgcctccatgaaaatagacgttcttcttcgtagggtcacgttccaggccgtggtcggcaaaatacatgacgctggcgcggcgatcttttaataattcaaaaacctgacctagcaaactatctgtgtaatgaatggagttgtcatagcaggcatcctgatcgtcctgcggttgaaacacggcgctggattgcggataggcgctacaagccggttcatggcttccatttaaatgaagaacaatcagtttcttttgctgcgtattttgctgtaatgcttggcttaaatgcggcaacaacaattcatcaaatcctctgacataaactgtttccatggcgcgcatggcgatactggtaactgctgtaccattctgccgaaaagcggattggctgcttagccagaaagtctgaaatcctgcttgattagccatattaataatgttgtcggggtaattatgaatgtcatgactcaaaacagaatcagcagttaaagaaaggggaacgctcagcgcagtgtaaggtgcgccgcttattgcttgattaaacagtttgatctgttttctttgtgcttcaacttgcggtgtcgtagagcgtgtatatccatacaaagacatattgtcgacacgtacagactcccccacaatcaacacgtaggtatcaatacctgtatccctgacacttaattgaaaatacggcaccgtgtttgcaatactgagtaatctttgatgctctttcgctgctaaagcaaaatagttgagattgaaaaacggcgtataggtagcaaatcggctcgctagtatatatggactgaacgcttttttattttttgcatctttataagcaaattgacaagcggaaaataaactgccgctaatgacaatcagcaataatattcctgtcactttttttgtcggcaaggaaacatcatattttattattactgccaaaaaaagaagggataaaaaagcaaaggcacatagataagggatatacatccccagcattttgacaacttcatccggatcactctggagcacactaatcgcaaatccatcattgaaagttgtaccaaaggtacaccaactatagaggctaatactcatgtctgccgcagtcagtaacacaaatggtgcggcaacaagcaggcgaagcggaagggaacttatacgttttacaaccaggatggtcagaacgaagaacagcaagcgctgaaccatatgcgctccggaagaagcgactaagttcgtaataccaaaaacaataacacaaagatacaacaaccaatgagatttaaaagttctagcaaatttgttgaatactgtcatccagaaatccaagttcacaaccaatataaacaattatcaacaatgtttaattttatatcagacatgtttttcaactctgatccatatcagaacgaaacactgttagttttttctttttaaatgatgcggccattgcgttctcagtaattaaataacattatcaatgcgtctctaaacattacgcagaacgtagccatcagtcgttatactgacaggagcaggatggtttatcgagaagtaaacatatccgtattcgtaccggaactggagttgacacaataaagtgccaattatgtcagtagaagggaaaaatttataactaaggcgtaccggcaccatcgtttcaaggtaccagctacgagtaaagcaactggacgagatacagatacctgacaaccattcctcagaccaggaccaaaacgaaaaaagacgcttttcagcgtctcttttctggaatttggtaccgaggacgggacttgaacccgtaagccctattgggcactaccacctcaaggtagcgtgtctaccaattccaccacctcggcacggatactactttttagttcgggatatcgctggtcggcttagccggagcagctggctgagtttgttcggttttcgccggtgcactcagattttcccattcgctacctttattggttttgttgctattgatgttacccagcaccagactgatgatgaagaataacgttgccagcagcgccgtcatgcgggtcatgaagttaccagaaccactactaccaaacagcgtagcggaagcgcctgctccgaaggaggctcccatatcagcgcctttaccttgctgcagcatgatcagaccaacaaggccaattgccacaataaggaaaactactaaaagagcttcatacataatcaacctgttccttgcggagttgccgcgtaccaatgcttcaaccaataaagcgggagtttttaatcttccccactgaagcgggtgtgaatactaaccaaagcgaatgaccttcgcaagggcaattttatcgcattgtatcaactgcggaaaaaaacagcaaaaccgatgtgttcgctgagaaaaaaggcgacaatcgccgcctttttagccagttatctaacgctttaaacggcttttactgcatcggcgatgcggtgtgcaaattcagtcacctgcgcttcgtcttcgccttccaccatcacgcgaattaacggttcggtgccggatttacgcagcaacacgcgtccacggttgcccagcgcagcttcaacctctgcggtcacggctttaacactctcatgctcaagtggatcgccgctacctgcggtgtaacgtacgttaaccagaatctgcgggaacattttcatgccgctgcaaaggtcgtgcaggctcatatggttacgtgccatcgccgccagcacctgcaagccagcaacgatgccgtcaccggtagtagttttatccagcaggatcacatgaccggaattctctgcaccgatacgccagcctttctcctgcattttttccagtacgtagcggtcacccactttcgcgcgcgcaaatggaattcctaactgtttcagcgccagttcaagccccatgttgctcatcaatgtacccacagcgccaccacgcagctggccctgacgaagaccttcacgcgcgatgatatacatgatctgatcgccatcgactttattgccttcatggtcaaccataatcacgcgatcgccatcgccgtcgaaggcaataccgagatccgctttttcagccagcacacgagcctggagcgcgcgaacgtcggtagcccccacttcggcattgatgtttacaccgtttggctcacaaccgatagcgataacgttcgcccccagttcgcgcagcacgttcggcgcgatgtgataagtcgcaccgtttgcacaatccaccacaatcttcagttcactgaggctaagttcgttcgggaacgtggctttgcaaaactcgatatagcgacccgcggcatcaacgatacggctggctttacccagttctgcgctatcaacgcagctgatctccttttccatttccgcttcgatggcctcttctaccgcatccggcagtttggtgccgtcgatagagaagaatttaatgccattatcgtagaacgggttatggcttgcagatatcacaattccggcctctgcgcggaaggtacgcgtcagataagccacggccggtgttggcatcgggccagtgaagagtgcggaaaggcccgctgccgccagacccgcttccagtgcactctccagcatatagccagaaatacgcgtgtctttaccaataataatcttacgggagccgtggcgcgccagcactttacccgcggcccaacccagcttaagcacaaaatcaggtgtgatcggcgcatcccctacacgaccacgaatcccatcggtaccgaaatatttacgattactcatagcgtttgttttcctttgcagacagagtggcttccaccacccgcatcgcttctacggtttctttgacgtcatgaacacgaatgatgtgcgcgccttgcattgcggcaatgaccgcacaggccagactaccgctcaggcgctcggacggccccacgttcagcagctgcccaatcatgctttttcgactcatacccaccaacagcggcaggttgaaatggtgaaattcagccaggcgcgccagtaaactatagttatgggagagatttttaccgaaaccgaatccggggtcgagcaacaatttctcttttgcgatacccgcctgctcgcaacgtgctatttgctcaataaagtagcgattcacttctgcaaagacatcgtcatacttcggagcttcctgcatggtttttggatttccctgcatatgcatcagacaaaccggtaaaccggtttctgcagccgcctccagagcgccaggttcggaaagggagcggatatcattaataatgtgagcgccaactttcgcactctcacggatgacttctggtttggatgtatcgacactgatccagacttcgaagcgttgagcaattgcctcaaccacaggaataacacgttgcaactcttcttcaacgctaacttccgccgcccctgggcgcgtggactcgccaccaacgtcaatgatcgtcgcgccagcgttgatcatcagattcgcatgtttcaccgcatctatcaggctgttatgcgtgccaccatcgctaaaggaatcaggcgtgacgttgaggatccccattacgtgaggatggctaaggtccagactagtaccctgggcaaagagtttcatgatgttatccctggtatgaattgataagaaaaaaccccggagcacgccccggggttttcggtacaaatacagtcatctgatgcgggaacttacttgtcgcctaactgctcactcatggtgttacccgggttcggcgtacgcggttcatcaaccggacgaggagcctttggactaccattgtcgccagaattgttagaagcgcctggttcttcccagcccgctggcggacgtacatcgcgacgtgccatcaggtcatcaatctgcggtgcgtcgatagtctcatatttcatgagagcatctttcatcgcatgcagaatatccatattgtcggtcagaagctgacgcgcacgattatagttacgctcaatcagtgctttcacttcctggtcgatgatacgtgcagtttcatcggacatatgtttcgctttcgctacgctacggccgaggaacacttcaccttcttcttccgcgtacagcagtggacccaatttctcagagaagccccactgagtcaccatgttacgtgccaggttggtcgcaactttaatatcgttggacgcaccggtagatacatgttccggcccgtagatgatctcttctgccagacgaccaccgtacagcgtagaaatctggctttccagtttctgacggctggcgctgattgcgtcgccctcaggcaagaagaaagtcacacccagcgcacgaccgcgtgggataatcgtcactttgtgcaccggatcgtgttccggcaccaggcgaccgataatcgcatgacccgcttcgtggtaagccgtgctttctttctgcgcttccgtcatcaccatggagcgacgttccgcacccatcatgattttgtctttcgctttctcgaactcaaccatgctcacaacgcgtttgttgccacgagcagcgaacagtgccgcttcgttcaccaggttcgccaggtcagcaccggagaaaccaggagtaccacgggcaatgattgccgcgtcgatatcgggtgccaatggtacgcgacgcatgtgaactttcaggatctgctcacgaccgcgaacatctggcaagccgaccacaacctgacggtcgaaacggccaggacgcagcagggccgggtcgagaacgtccggacggttagtcgcggcgataacgatgataccttcgttaccttcgaagccatccatctcaaccagcatctggttcagagtctgttcacgttcatcgtgaccaccgcccagaccagcgccacgctggcggcctacggcgtcgatttcatcgataaagatgatgcacggtgccgctttcttcgcctgttcgaacatgtcacgaacacgggatgcacccacaccgacgaacatttctacgaagtcagaaccggagatagtaaagaacggaactttcgcttcgcctgcaatcgctttcgccagcagcgttttaccggtacccggaggaccgaccatcaagacgcctttcgggatcttaccgccgagtttctggaagcggctcggctcgcgcagatactcaaccagttcagcaacttcttcttttgcttcgtcgcagcccgcaacgtcagcaaaggtcgttttgatctgatcttccgtcagcatgcgcgctttgctcttaccaaagctcatggcacctttgccaccgccgccctgcatttgacgcatgaagaagatccagacaccaatcagcaacagcatcgggaaccaggagatgaagatagaagccagcaggcttggttcttcaggcggttcaccgacaaccttgacgttcttggtcaacaggttatccagtaatttcggatcctgaaccggaatgtaagtggtataacggttactatctttcttggtaacgttgatttcacgtccgttgatacgcgcttcacgaacctggtcgttattgacctcttgtaggaaggtagagtaatccaccttacggccattagactcgctgggcccaaagctctggaatacactcatcagcacaacggcaatgaccagccagagtattaggtttttcgccatgtcactcaagggattaacctcttattacaactgtgttaaaaacagcgtcaggatactctatatccagcatctttcaaactttcgtctgaaatctcccggttagggtttacgcccggtcgctacaatatacacttcccggctacgtgcacgagaagagtccagcttacgaactttgaccttcgtaaacagggagcgaatttcccttagatactcatcgaaaccttcgccctggaacaccttcactacaaaactgccacctggcgctaatacatcacgacacatttctagcgccagttccaccagatacatggcacgggggatatccaccgccggtgttccgctcatgtttggtgccatatcggacatgacaacctggactttgctgtcgccaacgcgctccagcagtgctttcatcaccagttcatcacgaaaatcgccctgaagaaagtccacaccaacgataggatccataggtaaaagatcgcaagcgatgatgcggcctttgccgccaatttgggtgaccacatattgactccaaccacccggagcagcaccaaggtcgacaaccgtcattcccggtttaaagagtttgtcactttgctgtatttcatcaagtttaaaccaggcacgggaacgtaacccctttttctgtgcctgttgaacatatttatcgctaaagtgttcctgaagccagcggctggagctggcagaacgcttcttacctgtcatttaactttcccatggggataactcatcgtaaccaattgcgtaaatttttacgcgcctatttggtgatatatgggagatggcggtagaatgacccgttttcaatcccaacgtaagcaaaaaatacgatgaatctgagtactaaacaaaaacagcacctgaaaggtctggcacatccgctcaagccagttgttctgcttggcagtaatggtttgaccgaaggggtgctggccgagattgaacaagcgttagagcaccatgaactcatcaaggtgaaaatcgccaccgaagatcgcgaaactaaaaccttgatcgtggaagctatcgtgcgcgaaaccggcgcctgtaatgtacaggtcatcggtaaaacgctggtgctttatcgcccaactaaagaacgtaaaatcagcctgccacgctaagattatcctaaagttacacacatttgctgtgtaaaacgaggggttttccgcaggcaggagagcaaaatgccacgctctgttcgttgataaaaggccgcatagcggcctttttcctttctttacaatacatcaacatcttgagtattgggtaattcttacaggtattccaccttaattacttcaaattctacttcgccgcccggcgttttgatgaccacaacatcatcttcttctttgccgatcaggccacgagcaatagggctgtttacagaaatcaggttttgtttaaagtcagcttcgtcatcgccaacgatgcgataagtctgttcttcgtcagaatccagattcagcaccgttacggtagcaccaaaaataacgcgcccattgttgggcattttggtgacatcaatcacctgcgcgttgctcagcttggcttcgatgtctttaatacggccttcgcagaaaccctgctgttcacgagctgcgtggtattcggcgttttctttcaggtcgccatgctcacgcgcttccgcgatagcagcaatgatttcaggacggcgcacagatttcagaaaatccagctcttcgcgtaatttttcagcgccgcgtaaggtcatcggaatagcttgcatttgttatacctcttgaatattcctgatagggcaagtcttcacccaccccggctgttcggcctgcccggcataactccttaccgggaccagaagcaaaaaaataccgacccgggtacaagtcccaggtcagctacaattcacattttgatagtcattttaccctgaagttcccgaagggtcatcgtttactttatagggcgttgcgccgtagtatgacggctcgattccaggttgttagcgcgagattatgcgattttccagatttatcatcggattgaccagctgtatagcgttcagtgttcaggccgcaaatgttgatgagtacattactcaactccccgctggtgccaaccttgccctgatggtgcaaaaagtcggcgcgagcgcccccgctattgattaccacagtcagcagatggcgctgcctgccagtacccagaaagtgattactgcgctggcggcgttgattcaactcggccccgattttcgttttaccacgacgcttgaaaccaaaggcaatgtggaaaacggcgtacttaagggtgacttagtggcgcgatttggtgccgatccgacgttaaaacgtcaggatattcgcaatatggtcgcgactttgaaaaaatctggcgtcaaccaaatcgatggcaatgtgttgatagatacctccattttcgccagccacgataaagcccccggctggccatggaatgacatgacacaatgctttagcgctccgcctgccgccgccatagttgaccgcaactgtttctccgtcagcctctacagtgccccaaagcctggtgatatggcttttatacgcgtggcatcttattaccccgttacgatgttcagccaggtacgcaccctcccccgtggttctgccgaagcgcaatactgcgaactggatgtggtgccaggcgacctgaaccgctttacgctgacgggatgcctgccacaacgttctgagccgctcccgttggcttttgccgtgcaggatggagccagctatgccggtgcaattctgaaagatgagttaaaacaggcgggtatcacctggagcggaacactgctgcgccagactcaggttaacgaacctggaacggtagttgccagtaaacagagcgccccgctgcacgatctgcttaagattatgctgaaaaagagcgacaacatgatcgccgatacggttttccgcatgataggccatgcgcgcttcaatgtgcctggaacatggcgggccgggagcgacgccgtgcgtcagatcctgcgccagcaagccggtgtcgatattggaaacaccattattgccgatggtagtgggcttagccggcataacctgattgcccccgccaccatgatgcaggtgctgcaatacattgcccaacacgacaatgaacttaactttatctccatgctgccgctggcgggctatgacggctctttgcagtaccgtgcaggtctgcatcaggcgggcgtggatggaaaagtcagtgcgaaaaccggtagcttgcagggggtatataacctggcgggattcattaccacagcgagcgggcaacgaatggcgtttgtgcaatatctttctggctatgcagtagaacctgcggatcagcgtaatcgccgtattccgttagtgcgttttgaaagccgtttgtataaagatatttatcagaacaattaatcaaaaagaaaccccggcacatggccggggcttcagattattgacaaagtgcgctttgtttatgccggatgcggcgtaaacgccttatccggcctacaaaatcgtgcaaattcaacatattgcaattctcttgtaggcctgataagcgtagcgcatcaggctgatttggcgtttatcatcagtgattaacgcttgtaaatgaactcaacgccttcttcgtcgtcttcgtcccagtcgtcatcccagtcttcatcatcctcttcagcaatctcttcaagctgctggcgatgataatcatcccacatgaattcgactttctctggctgtttcgcttcttcagcctgcacgaccgggttttcaatgataaaggtcatcacatcccagcagagatctttcacgcccagtccactcgccgcagagatcagataatatttatcttcccagcccagcgcctcagcgatcgctttcgctttctcttcggcttctaccttatccagcagatcgatcttgttgaacactaaccaacgcggtttcgtcgccagatcctggctgtatttttccagctcgctgataataatacgcgcgttttcaaccggatcggtgccgtcaatcggatcgatatcgatgaggtgcaacaggacgcggcaacgttccaggtgcttcaggaagcgaatgcccagacctgcgccttccgcagcgccttcaatcagtcctggaatatcggcaacaacgaagctcttttcgttgtccattcgtaccacacccagacttggcaccagagtggtaaacggataatccgccactttcggtttagccgcgcttaccgcacgaataaaggtgcttttacccgcgtttggcatccccaacataccgacgtcagccagcagcatcagctccagcagcagctcgcgcttatcgcccggcgtgccgttggttttctgccgcggtgtacggttaacggagcttttgaaacgggtattgcccagaccgtgccagccgcccttagcaaccagcagacgctgaccgtgtttggtcatatcgcccatggtttcaccagtaccctggtcgattacacgcgtacctaccggcactttaatcgtcacgtctttaccgcgcttaccggtacagtcgcggcttgcgccattctgaccgcgctctgcacggaaagatttttcaaaacgataatcgataagcgtgttcaggttctcgtcggcttccatccatacgtcaccaccatcaccgccgtcgccgccatccgggccgcctttcggaatatacttttcgcggcggaagctcacgcaaccattaccgccatcacctgcaacgaccagaatgcttgcttcatcaacaaacttcattttattctccgtaaatcattcgcctgcgcggggttggcttaccaccgttgtatgcttacgtaatccgccccaaatacgatgaccaatggcggaatacatcgcgcccgcaaccacgacaaacgcaccgagataacctaaaaggtttaacatcggtctggcgaagaaatcgggccaggccagacttaaaagatcactaaaaaacagcgtaaacagtggggtgagcgtgatgatcgcgctcacctgcgctgcctgccagcgagccatcgcttccgccagggcgccatatcctaccaaggtattcagtccgcaaaaaattaaacatgcgagctgccagtggctaagctgcgctatcactccaggctttgccagagggaagagcgcaattgtacataaagtgtacagtaaaaacaggatctgcggactggccagccgacgcaataaaaccttttgcgccacgccataactcacccaaaccgtcgccgcaccgaccccaaagataactccccaggtgtaatcggtgagctttgtaaatatctcgaccagactggtgttaaaaaacatcaccaggccgctcaggagcatcaatgcccctacaacctgagtgctgcgcattttctctttgaggataaatacgctggcaaccatcatgccaactgggctgagttgcccaatcacctggctagcggtcggactcaggtattgcaaggaactgctgaacaggatgaagttcccaaacagcccggcggtcgccactgccaacaaaatcaaccagcgtggcttacgaaacacgcgtaatggcggcaacctcttcttcaccgcaagaatggcacccaggccaatactcgccatcaagaaacggtaaaacacgattgtcggaggttccatcacctccagcacctgcttcattgcgattggcaacgccccccagcaaattgctgtggtgagcgccaaaagaatgccaatgcctgcctgctgcttcataccgtattccctgcaaagcgcatttgcggattaacgtcgcaccatgcgcatttttaccggttatcgaatgtaaaaagccccgcaacgtgttgcggggctttcatccgttaccgggacgcgaaaaacttattcagcttcgatgctgataaatttacggtttttcgggcctttaacttcgaatttcactttaccgtctgctttagcaaacagagtgtggtcacgaccgcaacctacgttagcgccagcgtggaatttggtaccacgttgacgaacgatgatgctacccgccagaacggattcgccaccgaaacgcttaacgcccaggcgtttagcttcactatcgcgaccgttacgtgtggagccgccagcctttttatgtgccatttgaaatctctcctcaggtcttaggcgctgatgccagtaattttcacatcagtgaaccactgacgatggccctgctgcttacgatagtgtttacgacgacgaaacttaacgattttaactttctcgccacgaccgtgagcaacaacttcagctttgattacgccgccatcaacgaaaggaacgccgattttgacttcttcaccgtttgcgatcatcagcacttcagcgaactcaacagtttcgccagttgcgatgtccagcttttccaggcgaacggtctgaccttcgcttactcggtgttgtttaccaccactttggaaaaccgcgtacatataaaactccgcttccgcgcacaccttttcaatgattcagagtgcgctataaatattcacaatagggcgcgaatattacgcaaaacgcacgcctttgacaagtgctacagtcaatacacgaagaaaaaaaacacaacttgtacggtaacgtttatctgtgccattttttcagtacaatcaccctatattcctaaccataaaccctaagttgcctttgttcacagtaaggtaatcggggcgaaaagcccggcttttgcgatgaatttagaaaaaatcaatgagttaaccgcgcaagatatggcgggtgttaatgcggcaatccttgagcagcttaattccgacgtccaactgatcaatcagttaggctattacatcgtcagcggcggcggtaaacgtattcgtccgatgattgctgtactggctgcacgagctgttggctatgagggaaatgcgcatgtcaccattgctgccctgatcgagtttatccacacggcgactctgctacacgacgacgttgtggatgaaagtgatatgcgcaggggtaaagctaccgccaacgccgcatttggcaatgccgccagcgtgctggtaggcgattttatttatacccgcgctttccagatgatgaccagcctcggtagcctcaaagtgctggaagtcatgagtgaagccgtaaacgtcatcgcagaaggtgaagttctgcaactgatgaacgttaacgatccggacatcactgaagaaaactacatgcgcgttatctatagcaaaaccgcgcgtctgtttgaggctgccgcgcagtgttccgggattctggctggctgtacgccggaggaggagaaaggcctgcaggattatgggcgctatctcggcactgctttccagttgatcgacgatttactcgattacaatgccgatggcgaacagttaggtaaaaatgtcggcgacgatctgaacgaaggtaaaccgacgctgccgctgctgcatgcgatgcatcatggcacaccagaacaggcacagatgatccgtaccgccatcgaacagggtaacggtcgccatcttctggaaccggttctggaagcaatgaacgcttgtggatctcttgaatggacgcgtcagcgtgccgaggaagaagcagacaaagccatcgcagcgttacaggtgctcccggacaccccttggcgagaagcactcatcggcctcgcgcacatcgctgttcaacgcgatcgttaatcccctcccctcatcccgcgcagcgcgcgggatggttccagtaagttccataaaaacacttattcagctctataacacctgaaaaatagggatgtgcatctttatatattctgaatattcacactctttacaggaactttttagagcaataggccatcaggagtatagtgatgctcgacagaagaagtgttctgaatgaaagcgactaacttaaggagtgaggaaaaatggaaagtaatttcattgactggcatcccgctgacatcattgcgggtttgcgcaagaagggaacgagtatggcggcggaatctcgcagaaatggtttgagttccagtacgctggcgaatgcattaagccgcccatggccgaaaggagagatgattattgcgaaagccctgggaactgacccctgggttatctggccaagtcgctaccatgatccgcagacccatgagtttatcgacagaacgcagttgatgcgtagctacactaaaccgaaaaaatgagtggtctggcggtagccccgcgaacggggctgccagctctcagacgattattcgcctttcacacgctcaatatttgcacctaaagcgcgcagtttgtcttcaatgcgttcgtagccacgatcgatgtgataaatacgatcaaccaccgtcgtcccttccgcaatacagccagccagcaccaggcttgcacttgcacgcagatcggttgccataacctgtgcgccagaaagtttttcaacaccgtgacaaataacggtattgctttcgatttcggcgtgcgcgcccatacggctcagctctggcacatgcataaagcggttttcaaagaccgtttcggtgataaacccggtcccttctgccaccaggttcaacagcgtgaactgggcctgcatatcggtcgggaatgccggatgcggcgcggtacgtacgttaacagccttcggacgtttgccatgcatatccaggctaatccagtcttcgccgacttcgatgtccgctccagcgtcacgcagtttcgccagcacggcgtcgagagtatctggctgcgcgttacggcagataattttgccgcgagaaatcgccgccgccaccaggaaagtaccggtttcgatacgatccggcagaacgcgatagacaccgccgcctaaacgttccacaccttcgatgacgatacgatcggtgccctgaccgctaattttcgcacccagcgtaatcaggaagttcgcggtatcgacgatttccggttcacgcgctgcgttttcaataatcgtggtgccttccgccagggttgcagcacacatgatggtcaccgttgcgccaacgctgactttatccatcacgatatgtgcacctttcaaacgaccatcgacggaagctttaacgtaaccttcttccagtttgatggtcgcgcctaattgttcgaggccagaaatgtgtagatcaaccggacgcgcaccgatcgtacaaccgccaggtagactaacttgcccctgaccaaagcgcgctaccagcggccccagcgcccagatagaagcacgcatggttttaaccagatcgtaaggtgcgcagaatacattaacgtcgcgggcatcaatatgcacagaaccattacgttctactttcgcacccagctggcttagcagcttcatacttgtatcgacgtctttcagtttcgggacgttctggatctctaccggttcttccgccagtagtgcggcaaaaaggataggcagagcagcatttttagcgccggaaattgtgacttcgccctggagcttcgttggcccctgaacacgaaatttatccatttagtttgttctcagttaacaattcatatccgctaccggcgaatcgcccatagctcaaaagccgttcagtttgcgatcgcgcgcccactccgcaggggtatacgctttgatgctcacagcatgaatgcggttatccgcaatatattccatcagcggaccatagaccgtctgctgttttttaacccgactcatgccgtcaaacaactcacccacggcaataacctgaaagtggctgccatcgccggaaacgtggacttcctggagggagagagcgttcatcaacacgctctgaatttcattattttccatgggatcttcaatcatcagttaataaaccagcgaaacatcttagagcaaagttgcgctggcataaataagcaaaaagcctcgctgataaatcagacaaggctcgacttgcaggcaggtttgccggacaggcggttaacgccatatccggcctgaaaaaatttaacgaggcagaacatcagcaggcaaattatacaatttcgccagggtatacactttgtcgtttaccccctgaagcgtcacattgttgccctgctttttcgccagatcgataagatggagcagcagtgccagtccccccgtatccacgcgggagacacggctaagatcgatgcaggtaatccccttcaccgcttcctcacgcatttcccaaagcggtagcaaaacgtcctgatccagctctccggataacgccagcgtgtcacccgtctgcatccagctcagactctcgctcattattttttctcttccagagtgattttctgttgagaaatgcttttcagttgcgcagtcaggccgtcgatacctttggtacgcagcagcgttccccactcgttttgtttggtggtgatcatactgacgccttcagcaatcatgtcgtaagcctgccaattgcccgtctgggagtttttacgccactggaagtccagacgcaccggcggacggccattcgggtcaataatggtaacgcgaataggcacaatggttttatcgcccagcggctgttctggcgcaatctgataggtttgaccgtgatacatcgccagcgcctgaccgtaagcctgcttcaggtactcacggaaagcggcaaagtaggcttcacgttgagcaggggtcgcactcttgtaatactggcccagcaccagcgcaccggcgtatttcacctgtacgtatggcagcagttcctgatcaacaatggtacgcagataatccgggttggcccgaatttgcggttgctcattcttcaggcgatcgaacgttttctgcgccgcctcgtccatcagcttatacggattggtctggtctgccgcggttgccgcactcagaggtgcaatcaccagcaaagcgaccatcattaaacgtttaaacatgcgtcggttctcctgaaattatttcgttgtacccacaggttcagtggtttcattattacctggcgcagcagctggcgcatcgccactattcttattgtcatcgcctttactaccgtaaaggaactgaccaatgagatcttccagcaccatcgcagacttagtgtcctgaattgtatcgccatccttcaggatagcagtccccagttccgggtcttcaaaaccgacgtttaatgccagatattgttcccccagcaggccggaagtacgaatgctcaggctactggtatctggaatgtggttataacgttgttcaatttccagcgttacgcgcggcagataggttttcgggtccagcgtaatatccgccacccgacccacaacaacgccaccaatactgaccggagagcgcgctttcaggccgccaatgttatcgaacgtcgcataaagcgtgtaggtcggttcagtacgtatggacgtcacgttcgccgccttcaggcaaacaaacagcgccgccagcagtgctgctaataaaaagatacccacccaaatttcattttttttcgtttgcatgaactcaattcccaaacatcaatgcggtcagcacaaaatccagccccagaacagccagagagctgtggacaacggtgcgagtggttgcccggctaatcccggcagacgtcgggatggcgtcgtagccgttaaacaagctaatccacgtcaccgtgatggcgaacaccacgctcttaatcagacagttgaccagatccatacgccagtcgacggcattttgcattgcgctccagaagaacccgctatcaatgcctttccaactgacgccgaccagagatccgccccagatccccacggcgacgaaaataaccgtcaacagtggtaaactaataaccccagcccagaaacggggagaaataacccgacgcagcggatccaccgccatcatctccatactggagagttgctctgtagcgcgcatcaggccgatttctgcggttagcgcgctaccagcacgcccggcaaacaacaacgcggcaaccaccggccccagttcacgcagtaggcttaacgccaccagcatacccagactggtttccgcactataagtggtcagaaccagataaccttgcagccccaacaccattccgatgaacacgccagaaaccacaataatcagcatgctcaggacgccgacattatagagctggcgcaccagcagcggcgcatgtttgcgaaattccggtttgccgaccagcgcattgaataacattaacccggcccgcccgaacgttctcagggttttaatccctttatgtccgaggctcgccagcgcatttaacagcatgagtggcttaactccctggtaaaagatcagcgtgataatcgccggcaggatagcggaacggaacaggcccgtcagctatcccgtccagaaactgacgtacgcgcggatcaggattcgcctgcaacgcctgggcactgccatgagcgacaatttttttgtccgccaggatccaggcgtgatccgcaatacttaacacttccggcacatcgtgagaaaccaccacacaagtcacgcccagcgcgctgttcagctcagaaatcagcttcaccagtacgcccatggtgatgggatcttgcccaacaaaaggttcatcaaacatgatgagatccggctccagcgcaatcgcacgcgccagcgctgcacgccgcgccatcccaccggaaagttcagaaggcattagtttagccgctccacgcagccccacggcctccagcttcatcatcaccgtactatgcaacaatggcgcgggaagttgggtatgttcgcgcagtggataggcgacgttgtcaaatacgttcatatcagtgaacaacgccccggactgaaataacatgctcatccgtttgcgcactgtatacaggcggctacgagacatcgccggaatattctcaccatcgaaaaggatctcaccatgatctggtgcgatttgcccgccaatcagacggagtagcgtcgttttaccgatgccgcttggccccatgatcgccgtgatcttccctcgcggcacggtcagggaaatattatcgaagatgcagcgattgccacgcgtaaaactgacatcgcgcatatcgactaaattcgccacagactgctccataattcacccttcgtcttgcgttgattttctaagcatggcgctcaatttaaccttgaacccaacatatttacagaatattacccgccgtggttagcgaaagctggcatttgttttactttttagccgcataaagtcaaaattaagcatccgttacggctttctgaaaatcttcagcggaccggcgagtatacctgaagaaaggacgttagatgcttttagctacggcactgttaattgttggtttacttttggtcgtttacagtgccgaccgcctggtttttgccgcgtctattctttgccgaacctttggcatcccgccgctgatcatcggcatgacggtggtcagtattggtacaagcttaccagaagtcatcgtcagccttgccgcgtctctgcacgaacaacgcgatttagccgttggtacagccctcggcagtaacattatcaatatattgctgatcctcggtctggctgcgctggttcgtccttttaccgtccattctgatgttctacgccgtgaattacccttaatgttgttggtcagcgtggtggccggttccgtactctatgacggacaacttagtcgcagcgatggtatctttctcctctttctggctgtgctatggctgctgttcattgttaaacttgcacgtcaggctgaacgtcaggggactgacagcctgaccagagagcagcttgcagagctgccgcgtgacggcggattgcccgtcgcgtttttatggctcggcattgcgcttatcatcatgccagtggccacgcggatggtggttgataacgccacggtgctggcgaattactttgccatcagcgagttgacgatgggtctgacggcaattgctatcggaaccagcctgccggaactggcaaccgcaatagcgggggttcgcaaaggtgaaaacgacattgctgtcggaaatatcattggcgcaaacatttttaatattgtcatcgtgttgggtttacccgcgctgataacgccaggagagattgatccactggcgtacagtcgtgactacagcgtgatgttgctggtgagcattatttttgcgttgctgtgctggcggcgctccccgcaaccgggccgtggtgtaggggtattattaactggcggatttatcgtatggctggcgatgttgtactggttaagcccaatactcgttgaataactggaaacgcattatgagccacgtagagttacaaccgggttttgactttcagcaagcaggtaaagaagtcctggcgattgaacgtgaatgcctggcggagcttgatcaatacatcaatcagaatttcacgcttgcctgtgaaaagatgttctggtgtaaagggaaagttgtcgtcatggggatgggaaaaagcgggcatattgggcgaaaaatggcggcaacgtttgccagcaccggtacacctagttttttcgtccatcctggtgaagccgcgcatggtgatttaggcatggttaccccacaggatgtggtgattgctatctctaactctggtgaatccagcgaaatcacggccttaattccagtgcttaagcgtcttcacgtaccgttaatctgcatcaccggtcgcccggagagcagcatggcgcgcgccgcagatgtgcatctgtgtgttaaagtagcgaaagaagcctgtccgttagggctggcaccgaccagcagcaccaccgccacgctggttatgggcgatgccctcgctgtcgcgctgttaaaagcacgcggctttactgctgaagattttgcgctcagtcacccaggcggcgcactgggtcgtaaacttctgctgcgcgtaaacgatattatgcatacgggcgatgagatcccgcatgttaagaaaacggccagtctgcgtgacgcgttgctggaagttacccgcaaaaatcttggtatgactgtcatttgcgatgacaatatgatgattgaaggcatctttaccgacggtgatttacgccgtgtcttcgatatgggcgtggatgttcgtcagttaagtattgccgatgtgatgacgccggggggaatacgtgtgcgccctggcattctggccgttgaggcactgaacttaatgcagtcccgccatatcacctccgtgatggttgccgatggcgaccatttactcggtgtgttacatatgcatgatttactgcgtgcaggcgtagtgtaaagattcaaggataaacaacaatgagcaaagcaggtgcgagccttgcgacctgttacggccctgtcagcgccgacgttatagcaaaagcagagaacattcgtctgctgatcctcgatgtcgatggcgtactgagtgatggcctgatttatatgggcaataatggcgaagagctgaaagcgttcaatgttcgtgacggttatggcattcgttgtgcgctcacctctgatattgaagtcgctatcattaccgggcgaaaggctaaactggtagaagatcgttgtgccacattggggatcactcacttgtatcaggggcagagtaacaaactgatcgcctttagcgatctgctggaaaaactggcgattgccccggaaaatgtggcttatgtcggcgatgatctcatcgactggccggtaatggaaaaagtgggtttaagcgtcgccgtggccgatgcgcatccactgttgatcccgcgcgccgattacgtgacgcgcattgctggcggtcgtggcgcagtgcgcgaagtttgcgacttattactcctggcgcagggcaaactggatgaagccaaagggcaaagcatatgagtaaagccagacgttgggttatcattgtgctaagtctggcggttctggtgatgatcggcattaatatggccgaaaaagacgataccgcccaggtggtcgtcaacaacaatgatcccacctataaaagcgagcatacggacacgctcgtctataacccagaaggggcactaagctatcgattgattgctcaacacgttgaatattattccgatcaggccgttagctggtttacgcagccggtacttaccacgtttgataaggataaaatcccgacatggtccgtaaaagcagataaagccaagctgaccaatgaccggatgctctatttatatggacacgttgaagtcaacgcacttgtgccagactctcaacttcgcagaatcacgacggataacgcgcagatcaatctggtgacgcaggatgttacctctgaagacctcgtcacgttatacggaacaacatttaactccagcggtctgaaaatgcgcggcaacttacgcagcaagaacgccgagctgattgaaaaggttagaacatcctatgaaattcaaaacaaacaaactcagccttaatcttgtgcttgccagcagtcttctggccgccagcattccggcatttgccgtaaccggagacactgatcagccgatccacattgaaagcgaccagcaatctcttgatatgcaaggcaacgtggttacctttaccggtaatgtcatcgtcacccagggcaccatcaaaattaatgccgacaaagtggtcgttacccgtccgggcggcgaacaaggtaaagaagtgattgacggctacggtaaaccggcaacgttctaccagatgcaggacaacggtaaacccgttgaaggtcacgcttcccagatgcactacgaactggcaaaagattttgtcgttctgacgggtaatgcttatctgcagcaggtcgatagcaacattaagggcgataagatcacttacctggtgaaagagcagaaaatgcaggctttcagcgacaaaggcaagcgcgtaacaaccgttctggtgccgagccagctgcaggacaaaaacaacaaaggccagaccccggcacagaagaagggtaattaattcgttatggcaacattaactgcaaagaaccttgcaaaagcctataaaggccgtcgcgtggtagaagacgtcagcctgaccgtcaactccggggaaattgtcggtctgctggggccaaacggtgccggtaagaccaccactttctacatggttgtaggcattgtgccgcgcgatgcgggcaacatcattattgatgatgacgatatcagtctgctgcctctgcatgcacgcgcgcgccgcggtatcggctatctgccacaggaagcctccattttccgtcgcctcagcgtttacgataacctgatggcggtactgcaaattcgtgacgacttgtctgctgaacaacgtgaagaccgcgcgaacgagctgatggaagagtttcacattgagcacctgcgtgacagcatggggcagagtctctccgggggtgaacgtcgccgtgtagaaattgcccgcgcactggctgcgaatccgaaatttattctgctcgacgaaccgtttgccggggttgacccgatcagcgttatcgacattaaacgcatcattgagcacctgcgcgacagcggcctgggcgtgctgatcactgaccacaacgtgcgtgaaacactggcggtttgtgaacgcgcttatatcgtcagtcaggggcatttgatcgcccacggcacgcctacagaaatcttacaagacgaacacgttaagcgtgtataccttggggaagacttcagactctgatagggtagaagtttgcgacgttttagcaggagagtacgattctgaacatgaagcaaggtttgcaactcaggcttagccaacaactggcgatgacgccacagctccaacaggcaattcgtctgttgcagttgagcacgctggaacttcagcaggagctacagcaggcgctggagagtaatccgctgcttgagcaaatcgacactcatgaagaaatcgacacccgcgaaacgcaagacagtgaaacgctggacaccgccgacgcgctcgaacaaaaagagatgccggaagagctgccgctcgatgccagttgggacaccatttacaccgctggtacaccatccggcaccagcggtgactacattgacgacgagctgccggtctaccagggcgaaacgacgcagaccttgcaggattacctgatgtggcaggttgagctgacaccgttttccgacactgaccgcgctattgctacctctatcgtcgatgccgttgatgaaaccggttatctgactgtcccgctggaagatattctcgaaagtataggcgatgaagagatcgacatcgacgaagttgaagccgtccttaagcggatccaacggtttgatccggtcggtgtggcggcaaaagatctgcgtgactgtctgctgatccaactctcccaattcgataagaccacgccgtggctggaagaggccagactgatcattagcgatcatctcgatctgttagccaatcacgacttccgcactttaatgcgcgtcacgcgtctgaaagaagatgtgctgaaagaagccgtcaatctgatccagagcctcgatccgcgccccgggcagagcatccagactggcgaacctgagtatgtcattccagatgtgctggtgcgtaagcataacggtcactggacggtagaactcaacagtgacagcattccgcgtctgcaaatcaaccagcactacgccagcatgtgcaataacgcgcgcaacgatggtgacagccagtttatccgcagcaatctgcaggatgccaaatggttgatcaagagtctggaaagccgtaacgatacgctactgcgcgtgagtcgctgtatcgttgaacagcagcaagccttctttgagcaaggtgaagaatatatgaaaccgatggtactggccgatatcgcccaggctgtcgaaatgcatgaaagcacgatatctcgcgtgaccacgcaaaaatacctgcatagtccacgaggcatttttgaactgaagtatttcttttccagtcacgtcaataccgagggcggcggcgaagcttcctccacggcgattcgtgcgctggtgaagaaattaatcgcggcggaaaacccagcgaaaccgttgagcgacagcaagttaacctctttgctgagcgaacaaggtatcatggtggcacgccgcactgttgcgaagtaccgagagtctttatccattccgccgagtaaccagcgtaaacaactcgtttgacccaaccgataaggaagacactatgcagctcaacattaccggaaataacgtcgagatcaccgaggcactgcgcgaatttgttacagccaaatttgccaaacttgagcaatattttgaccgaatcaaccaggtctatgttgttctgaaagtggagaaagtcacccacaccagtgatgcaacactgcatgtaaacggtggtgaaattcatgccagcgcggaaggtcaggacatgtacgctgccattgatggcttaattgataagctggcacgccagttgaccaaacataaagataaactgaaacaacactaattgtccgggcaattagcatgtgcatggcggtctgttgtgcggcacaacgggccatttgtacggttaatgctccgagcctgttccactgtttgagtgggcaggttcttaggtgaaattatgacaaataatgatacaactctacagcttagcagtgttcttaacagggaatgtacgcgaagccgcgtccactgtcagagcaaaaaacgcgccctggaaatcatcagcgagctggcggcgaaacaacttagcctgccgcctcaggtggtttttgaagctatcctgacgcgggaaaaaatgggcagtaccggtatcggcaatggtattgccattccgcatggcaaactggaagaagatactctgcgcgccgttggcgttttcgttcagctcgaaacgcctatagctttcgatgccatcgacaaccaaccggtggacttactttttgccctgctggtgccggcagaccaaactaaaacgcacctgcatactctgagcctggtggcgaaacgtctggcggacaaaaccatctgccgccgtttacgcgcagcccagagcgatgaagagctgtatcaaatcattacggataccgaaggtactccggatgaagcgtaattattcggtaatgtctcttttagacgttgtgaggagaaacagtacatggtactgatgatcgtcagcggacgtagtggtagtggtaaatctgtcgccctgcgtgcgctggaagatatgggtttttactgcgtggataaccttcccgtagtgttgttacccgatctggctcgaaccctggccgatcgcgagatttctgccgccgtcagcattgatgttcgtaatatgccggagagtccagaaatattcgaacaggcgatgagtaacctgcctgacgctttcagtccgcaactcctgttcctggatgccgaccgtaataccttaattcgtcgttacagtgacacgcgccgactgcatccgctttccagcaaaaacctgagcctggaaagtgctatcgacaaagaaagcgatttgctggagcctctgcgtagccgagcggatctgattgtcgataccagtgaaatgtccgttcacgagctggctgaaatgctgcgtacccgtctgctgggtaaacgtgaacgcgaactgaccatggtctttgagtctttcggcttcaaacacggtatccctatcgatgcagattacgtctttgacgtgcgcttcttgccgaacccgcactgggatccgaaactgcgtccaatgacaggtcttgataaacctgtcgccgcgttcctcgaccgccacacagaagtacacaattttatctaccagacgcgaagctatcttgagctatggttacctatgctggaaaccaacaaccgtagctacttgacggtcgccattggttgtaccggcgggaagcaccgtagcgtgtatattgcagagcaactggcagactacttccgcagccgcggtaaaaacgtccagagtcgccatcgtacgctggaaaaacgtaaaccatgaccgtcaagcaaactgttgaaatcacaaacaagctgggcatgcatgcccggcctgcaatgaagctgtttgaattaatgcagggttttgacgctgaagtgctcttacgtaatgacgaaggcaccgaggctgaagccaacagcgttattgcgctgctgatgttggattctgccaaaggacggcagattgaagttgaagcgaccggtccacaggaagaggaagcactggccgccgttatcgccctctttaattctggttttgatgaagattaatcttcatcactttgacatacaactcccttcaaactccccccgacaataagaaaatcacgtactgaaatcgttctcaatcaacgtcatttgtacattttgtgcgcttttcactttcagaagaaccttaagaaaaccttaagaggcattgtttaggttttgtttaagttaatcgaccatactggagatcgtcagaaaatatttccaggagatggcatgattcgcttatctgaacaaagtcccctgggcaccggaagacatcggaaatgttatgcgcatccggaagatgcccaacgctgtatcaagattgtctaccatcgtggcgatggtggcgataaagagatccgccgtgagttaaagtactacgcgcatcttggtcgccggttaaaagactggagtggaataccgcgctatcacggtaccgttgagacggattgcggaaccggttatgtctacgatgtgattgcagattttgacggcaagccttccattacgctgaccgaatttgctgaacaatgccgttacgaagaagacattgcacaactgcgccagctactgaaacagctgaagcgttatttgcaggataaccgtatcgtgacgatgagcctgaagccgcagaatatcctctgtcaccgcatcagtgagagtgaggttatcccggtcgtctgcgacaacattggtgaaagcacattgattccactggcgacctggagcaagtggtgttgtctgcgtaagcaagagcggttatggaaacgatttatcgcccaaccggcgctggctattgccctgcagaaagatctgcaacctcgtgagagcaaaacgctggccctcactagccgcgaagcttaatccagctggtgttgttgcataaacggctcaccgcctaactgatacatctgccgtaaaatccacgcctgacggctacgcacgtagccgcttgggctggagactttgaaacgaagtggattaggtaatacagctgccagtaatgcagcttcgctccgggtaagtttgctcgcgggtttgtggaaataacgttgtgccgcagcttcgacgccaaacacaccgtcgccaaattcggcgatattcaggtaaaccgtcaggatacgctttttgctccagaccgtttctatccccagcgttaatccggcttccagcccttttcgaacccagctacgcccatcccataaaaagagatttttggctgtctgttgagaaatcgtactagcaccgcgaatacggttttcattgcgctcgttgtgcgccagggctttctcaatggaagcgacatcaaagccccagtgctcaggaaatttctgatcttctgcggcaatcaccgccagtcccatccacgggctgatttgatccatactgacccagtcagaatgtgccacgtaacgaaaattgccatgcagccaggcgctgacctgtcgctcgaccattaccgcactgaagggaacaggcgcaacgctaaacaacgcgatgcccccgccccagaaaacggcgaggacaaccattaaccgcaaaagaaaacggcgaacgaaactaaacaccgttaagcggcttttactcattcagccagaaccagcacgcgggaaaccagcttatcaatgccgctcgccgcttctgcaatgttctgcgccagcatatatgctggggtggtgacaatcttattgtcttcatcaaccacgatatcatcgacaggacacggcacatgctccgcgcccatctcttccagcacttctgcggtatcgatatcagtaccgatggtcaaacgcagcgggaaatcgaaaattttcggcagcatcgccggggcaatacacataaaaccaagcggttttccggcctgatgcatcgcttgtgccagcgcctttaattcacggtcaacggtgcattcgctaccaagactggcaaaattgcttaaattcttcgccgcgccaaaccccccccggcacaatcaacgcatccagttcagcggcatcggcctgggccagaggacggatttcaccgcgcgttattcgtgccgcttcaatcagcacattgcgcgtttccgtcatcgcttcgccagttaaatggttgataacatcaacctgctgcttatccggtgcaaagcagaccgcctgcgcaccgctgcgactaatagctaacaacgtcaacaccgcttcatgaatttcagaaccgtcatagacgccgcatccgctcagaattacgccaattttcttcattgtgatcatcctttcgcaattgactgaaacacattaatttttttaataaaaatggtacgcatcacacatttaactgattcatgtaacaaatcatttaagttttgctatcttaactgcgtgcggcctgaaaaacagtgctgtgcccttgtaactcatcataataatttacggcgcagccaagatttccctggtgttggcgcagtattcgcgcaccccggtctagccggggtcattttttagtggcttttgccacccacgctttcagcacttctacgtcgtgacgccactcttctttcatctcttcaatccattcaccgacgttatcttcccaggccggaaggtcaggagactgaatttgctgacccagctgttgcagatggcgtaaccccacactccccgccgcacctttaattttatgtccttcctcaacaatgccttttttatcctgcgccgtcagattgctctccagcacgctgacatagcccggcatcatcttctcaaacaccgctaacccgtcggtgatcagcttcggtcctacaagttcgagatactgttccagcatgggaatatcgagcaatgcttcacttttactgttctcttctgtcgtcaccgtactctcctcatcatcctgggtatcccagaatttcttgatcatcgcggttagcgccggaacagaaagcggcttactcagcacatcatccattccagcattgaggtactcttgtttgtctttcagcacgttagcggttaaggccaccagcggcggtaaatcctcgcgcggataacgtttcgtcagttcacgagagatatccagcccggtcatatctggcaactgaatatccagcaacaccaggtcgtattcgcccggtttaaacatctccagcgccgccttgccggtcatggcgacatcaacgctgttacctaatttttccagcacagaacgcgcaacaatcacgttcagttcaatgtcttccaccagcagcacattcagcgccggtaaaggcatatcgtcttcatcaaacgcatcatcgacctcttctgctacgctcggtgcgtggatcgtcaacgtaaaggtactacctttgccctgttcgctggtaaccgtaatatcgccgcccatatttttcgccagacgacgagaaacggccagaccaataccggtgccggtggcaggtttaccgccatgactgtctttcacctggtaatacatggcgaaaattttatccagctcatcctgcggaatgccgataccagagtcttccacttcaaaatgcagcatatcgccttcatcgtagcgcacgcgcacggtaacctggccttgctgggtgaatttgacggcgttactgatgaggttccacaggatctgccgtaaacgcgtcccgtcggtaatgacctgatgcggtaatggcagcgtcggctccaggttaaagcgcaatcctttttgttgcgcctgcaatgcggagagattttccagatcggcaaggaagctggtgaaatcaaccggttgattatcaagctggaccttgcgccgttccatcttatccatgtcgataatatcgttaaagatattccccagcgtgacggcgctaacatggatggtcttgagatatttttcctgctcggcggtgagttcggtatccagcagaatgcggctcagaccgacgataccgttcagcggtgtacgcaattcgtgactgatggtggagataaacgtcgttttgtcgcggctggcccgttcaagcgcatcctgataccgcttacgctcggtaatgtcgcgaccaaagcccatcaaaccgtgacgtttacccacgcggtcgtagtacggcactttacggatttcaaagcaggctttgcgcccgtccgggtaatccagccactgttcataggtcagactcacattatgacggaacactttttcatcggtttcaatgacttttgcggcggcttccggactgtaaacatcagcaggtttcaggtgaaccagttgtttttcgctttttccggtcagcagctccatcgcgcggttacagccggaaaactctttatcttcgttacgataaaaaaccaggtcgggactagcatcaaggaaggaacgtaagaaactggattgctgctcgagctgaatttgtgtctcttcgcgctctttgatttcaattttcagttggccgaaggtttcctgcagttctgcttccgctttttcacgaacggcaatttcctgatttagctgggcaatattatcttttaactgaacgttgaggctcaaatcgcgctcgcgcatctcctccagtttttgcaccagccgactcagacgttgtcgactctcctccagttgctcgacgaccacgcttagaaagtagaccgcccacggcgtaatcagcaaaccaaagaagatagaacgaataacatcaatgctttcgacctgaccatgcagcaccatggttaccgccatttgtaccacaatggcaagaacgacgagggccagcgccagcaacatactgaagcgcaccagacctaacttcatcatcaggtcaacataatactgcgccagcagacgaatttgcttcattagggaattccttcacgacaacctgccccaataatacccaattctgacagttacgttataaattgtgtgagaaatgcggaattcccctcaacgacttactccgttggaggtagccacggacgtcccagcgcgcttccctgtacgccatgttcattcagatagcgatccagctcgaccattcccgtccatcgattttcgcaccacagcggagcaagcagcgtcgggcgacgggcgctggcggaaatgcggtggtagatcacttccggtggcgtatggcgaatcatttctccggcagtgagcgtgtaatcctccagttcaataccgttcaaacgccccgcttcccaggctttcgccataatgctgcctttcacaatatgcagcggatgcagctttatgccgtccacgccggtttcaaccactcgctccagcgtttgcaaacattcagcctgcccttcgccaggcaggccgacaattaagtgggaacacaccttcagcccgcgctgacgtgccagctgggttgtacgctgataacaggcaaaatcatggccgcggttgatgcgatgcagtgttttgtcgtgggcggtttgtagccccagctccagccacacttcgtaaccctggtccttatattcgcaaagcagatccagcaccgcatccggcacgcagtccgggcgggtacccacacacaaaccgacaatattggcctggctcaccgcctgctgatacatagaacgcagcacctgaacttccgcaaaggtgctggtatacgcctgaaagtaggccagatagcgtttagcgcggttaactaaattcgcctggtgcgccagttgctcggcaatggaacgatgctgctgcgcttcatcggcaaagctggcaacattacagaatgtgcagccaccacgcccgatggtaccgtcacggttagggcagctaaaaccgccgtgcagcgtcagcttatgcaccttttgcccataacgacgggtgagatcaccaccaaacatattgactaatttctgtaactgcataatctgatagaccgcgccttgaaaagaggccaaagcctgccatttttagctcaattcggcgatgacctggatcaatcgtcccggcctgcttttatcaactgcataatcaatcaaaattaccgaaatttcatgcataatcacataaatcacttttgcttatcttgtgtcagatttttttatctcctgatggattttaggcaaaaacagtagcatgaaacgtcattaccaattaaggcagtataaaatgctggttttgtcgtcagttcaaggcaggataagggttaacacacctttatgacagtcaggaattgactgtttctctaacgacttcccttttagccttaaagataaaatccattttaatttcagtcatttaataaagaattttgcgctaaagcacatttctgtaccaataagcttgccatttgacctgtatcagctttcccgataagttggaaatccgctggaagctttctggatgagcagcctgctcatcatatttatgcagtaattgagatcccctcttcaccgtattaaccgatgcgaaaaggacaacaagggggcgaatgcgaggcgcgcgtatgacacgcaaaccccgtcgccacgctctttctgtgcccgtgcgcagcggtagcgaagtggggttcccgcagagcctgggggaggttcacgatatgttgtacgataaatcccttgagagggataactgtggtttcggcctgatcgcccacatagaaggcgaacctagccacaaggtagtgcgtactgcaatacacgcactggcccgcatgcagcaccgtggcgcgattctcgccgatggtaaaaccggcgacggttgcggcttgctgttacaaaaaccggatcgcttttttcgcatcgttgcgcaggagcgcggctggcgtttagcaaaaaactacgctgtcgggatgctcttcctgaataaagatcctgaactcgccgctgccgcacgccgcatcgttgaagaagaactgcaacgcgaaaccttgagcattgtgggctggcgtgatgtccccactaacgaaggcgtgctgggtgaaatcgccctctcctctctgccacgcattgagcaaatttttgtgaacgccccggcaggctggcgtccacgcgatatggagcgccgtctgtttatcgcccgccgccgcattgaaaagcgtctcgaagccgacaaagacttctacgtctgtagcctgagcaatctggtgaacatctataaaggtctgtgtatgccgacggatctgccgcgcttttatctggatcttgcggacctgcgtctggaaagcgccatttgcctgttccaccagcgcttctccactaacaccgtaccgcgctggccgctggcgcaaccgttccgctatctggcgcataacggtgaaatcaacaccatcaccggtaaccgccaatgggcgcgtgcgcgtacttataaattccagacaccgcttatccctgacctgcacgacgccgcaccgttcgtcaacgaaaccggctctgactccagtagcatggataacatgctggaactgctgctggcaggcgggatggatatcatccgcgccatgcgtctattagtaccacccgcctggcagaacaacccggatatggacccggaactgcgtgccttctttgactttaactccatgcatatggagccgtgggatggcccggcgggcatcgtgatgtccgacggtcgttttgccgcctgtaacctcgaccgtaacggtctgcgtccggcgcgctacgtcatcaccaaagataagctcatcacctgcgcctctgaagtcggtatctgggattaccagcctgacgaagtggtcgaaaaaggccgcgtcgggccaggcgaactgatggttatcgacacccgcagtgggcgtattctgcacagcgcagaaaccgatgacgatctgaaaagccgccatccatataaagagtggatggagaaaaacgtccgccgactggtaccgtttgaagatctgcccgatgaagaagtgggtagccgcgaactggacgacgacacgcttgccagctaccagaaacagtttaactacagcgcggaagagctggactccgtaattcgcgtactgggcgaaaacggtcaggaagcggtcggtagcatgggcgatgataccccattcgccgtgctctccagtcagccgcgcattatttacgactacttccgccagcagtttgcccaggtgactaacccgccaatcgacccgctgcgtgaagcgcatgttatgagcctcgccaccagtatcggtcgtgaaatgaacgtcttttgcgaagcagagggccaggcgcaccgtttaagctttaaaagcccgattctgctctactccgatttcaaacagctcacgacgatgaaagaggagcactaccgcgcagatacgctggatatcacctttgacgtcactaaaaccacgctcgaagcgacagtcaaagagctgtgcgacaaagccgaaaaaatggtacgtagcggcaccgtgctgctggtgctctccgaccggaatatcgctaaagatcgcctgccggttccagccccgatggcggttggcgcgatccagacccgtctggtcgatcaaagcctgcgttgcgatgccaacatcatcgtcgaaaccgccagcgcccgcgatccgcaccacttcgccgtgttgctgggcttcggcgcgacggctatttatccataccttgcctatgaaacgctgggccgcctggtagacacccatgcgattgccaaagattatcgtaccgtgatgctcaactaccgtaacggcatcaacaaaggcttgtacaaaatcatgtccaaaatgggcatctccaccatcgcctcttaccgctgcagcaaactgtttgaagcggtcggtctacacgatgatgtagtgggcctgtgcttccagggggcggtcagccgcattggtggagcaagctttgaagacttccagcaggatctgctgaatctgagcaaacgtgcctggctggcgcgtaagcccatcagccagggcggtctgctgaaatacgtccacggcggcgaataccacgcctacaacccggacgtggtgcgcacgctgcaacaagcggtacaaagcggcgagtacagcgactatcaggaatacgcgaagctggttaatgagcgtccggcaaccacgctgcgcgatctgctggcaattacgccgggtgaaaacgcggtcaacattgctgatgttgaaccggcaagcgaactgtttaaacgctttgataccgccgcgatgtctatcggcgcgttaagcccggaagcccacgaggcgctggcggaagcgatgaacagcatcggcggtaatagcaactccggtgaaggcggcgaagacccggcgcgctacggcaccaacaaagtgagccgcatcaagcaggtggcttccggtcgctttggggttactccggcgtatctggtcaatgccgacgtcattcagattaaagtcgcccagggcgcgaagccaggcgaaggcggtcagttgccgggtgataaagtcacgccttacatcgccaaactgcgctatagcgtgcccggagtgacgctgatctccccgccgccgcaccacgatatctactctatcgaggacttagcgcagctcattttcgacctcaagcaggttaacccgaaagcgatgatctccgtgaagctggtttccgaaccgggagtaggcaccatcgcgactggcgtggcaaaagcttatgcggacttgatcaccatcgcaggctatgacggcggcaccggcgcaagtccgcttagtagcgtgaaatacgcaggctgtccgtgggagctggggcttgttgaaacccagcaggcgctggttgctaacggcttgcgtcacaagatccgtttgcaggtcgatggcggcctgaaaacgggtgtcgatatcatcaaggcggcgattctcggcgcagaaagcttcggcttcggcactggcccgatggtggcgctcggctgtaaatatctacgtatttgccatctgaacaactgcgcaacgggtgtagcaactcaggatgacaaactgcgtaagaaccactatcacggcctgccattcaaggtgacgaattactttgagtttatcgcccgtgaaacccgcgagctgatggcacagcttggcgtaacacgtctggtggatctgattggtcgcaccgacctgctgaaagagctggacggtttcaccgccaaacagcagaagctggcgctgagcaagctgctggagactgccgaaccgcatccaggtaaggcactctactgcaccgaaaacaacccgccgtttgataacggcctgctgaacgcgcagttgctgcaacaggcgaaaccgtttgtcgatgagcgccagagcaaaaccttctggttcgatattcgcaacaccgaccgttctgtcggcgcgagccttagtggctatatcgcccagacgcacggcgatcaggggctggcagccgatcctatcaaagcgtacttcaacggcaccgcaggccagagcttcggcgtgtggaacgcgggcggcgtggaactgtacctgaccggtgatgccaacgactatgtcggtaaaggcatggcgggcggcttaatcgccattcgtcctccggttggttccgccttccgcagccatgaagcaagcattatcggcaacacctgcctgtatggcgcgaccggtggtcgtctgtatgccgcaggccgcgcgggtgaacgtttcggcgtgcgtaactccggtgctatcaccgtggtagaaggcattggcgacaacggttgtgaatatatgacgggtggtatcgtctgcattctgggtaaaaccggcgttaacttcggtgcgggcatgaccggcggtttcgcttacgttctcgatgaaagcggcgatttccgcaaacgcgttaacccggaactggtcgaggtcttaagcgttgacgctctggcgatccatgaagagcatctgcgtggtcttatcaccgagcatgtgcagcataccggctctcagcgcggtgaagagattctggcgaactggagtaccttcgccactaaatttgcgctggttaaaccgaagtccagtgatgtaaaagcactgctgggtcaccgtagtcgtagcgcagctgagttgcgcgtgcaggcgcagtaaggggtagcaacaatgagtcagaatgtttatcaatttatcgacctgcagcgcgttgatccgccaaagaaaccgctgaagatccgcaaaattgagtttgttgaaatttacgagccgttttccgaaggccaggccaaagcgcaggctgaccgctgcctgagctgcggcaacccatactgcgagtggaaatgcccggtacacaactacatcccgaactggctgaagctcgccaacgaggggcgtatttttgaagcggcggaactgagccaccagaccaacaccctgccggaagtttgcggacgagtctgcccgcaagaccgtctgtgcgaaggttcctgcactctgaacgatgagtttggcgcggtgaccatcggcaacattgagcgctatatcaacgataaagcgttcgagatgggctggcgtccggatatgtctggtgtgaaacagaccggtaaaaaagtggcgattatcggcgcaggcccggcaggtctggcgtgtgcggatgtcctgacgcgtaacggcgtaaaagccgttgtcttcgaccgtcatccagaaattggcgggctgctgaccttcggtattccggccttcaagctggaaaaagaggtaatgacgcgtcgccgtgaaatcttcaccggcatgggtattgaattcaaactcaataccgaagtgggccgcgacgtacagctggacgatctgctgagtgattacgatgccgtgttccttggcgtcgggacttatcagagtatgcgcggcgggctggaaaacgaagacgccgatggcgtgtacgcagcgctgccgttcctcatcgccaacaccaaacagttaatgggctttggtgaaacccgcgacgaaccgttcgtcagcatggaaggcaaacgcgtggtggtccttggcggtggcgacactgcgatggactgcgtgcgtacgtccgtgcgccagggagcgaagcacgttacctgtgcctatcgtcgtgatgaagagaacatgccgggttcccgccgcgaagtgaaaaacgcgcgggaagaaggcgtagagttcaaattcaacgtccagccgctgggtattgaagtgaacggtaacggcaaagtcagcggcgtaaaaatggtgcgtaccgaaatgggcgaaccggacgccaaaggccgtcgccgcgcggagatcgttgcaggttccgaacatatcgttccggcagatgcggtgatcatggcgtttggtttccgtccacacaacatggaatggctggcaaaacacagcgtcgagctggatagtcaaggccgcatcatcgccccggaaggcagcgacaacgccttccagaccagcaacccgaaaatctttgctggcggcgatatcgtccgtggttccgatctggtggtgaccgctattgccgaaggtcgtaaggcggcagacggtattatgaactggctggaagtttaagcgaggtaacaatgaattcgccagactgtgtctggcgaatcaaattactgacgaagtgcgcgttgttttctggcaaatgcggcatgagcgtttgacctttcctataatagggataattttcaataaattgtgctttgttcaccaagtctgatgagtgaagcacatcaagcaatttctcatttacaatccgtctcaattacttgttaacacctctgacaataccgattctgcaagctattcagtcttttcattccatgtaaattgtctcgatattaatatacaaaatatgaatataaaaaaccaatatattatccttaattatctatatattttcctatttttcagcgcaaacattcatgtaatgaataattatcaccacaaaccacctcaccagcaccttattattcacatgatcgtaactataaaattcattaaataaatacaccccagcaagttggctatttctgaacgagttatttatttacattcacaaacagatatatatactgcttcagctttttattttaaaaaataaatttgttattaaggatatgttcatatgtttttcaaaaagaacctcacaacagctgctatttgtgcagcactttctgttgcagcattcagtgccatggcaacagatagtactgatacagaattaactatcatcggcgagtatacccctggtgcatgtaccccagttgttacgggcggcggcattgttgactatgggaaacatcataacagtgcgctgaatccgaccggtaaaagtaataaactggttcaactgggccgcaaaaacagcacattaaatataacctgcacagcaccaacgctaattgctgtaacctccaaggataaccgtcagagcaccattgtagcgttaaacgacacatcctatattgaaaaagcttatgatactctcgtagatatgaagggaacgaaaaacgcctttggtttaggttctgcgcctaatggacaaaaaattggcgctgcatccattggtattgacaggtctaatggtgggattcacgcggcggacgatacaggtgaaattcctgtcgacctgattcaaactgaccactggagtgcagcgacccccacatggaaagccagttctaatggcgcattctgcagcctgacaagttgcagtgcaatcgagcgcggttattctgttgcaaaaacaggggaactgacacctgttgctattacagcggtcaccttcccgttactgattgatgctgcggtaaatgacaatactattcttggttctgatgaaacgatcaaactggatggtaacgtcactatcagcgttcagtatttataagaacttgtaatacagtttttatttttacgcattaaccagttagctataactcggacagattatgccctatgacatggtctgtcttaatcaatctcatcgcaaacagtgcataacatatattaacaatatgtttctgcgttatttatcattattacaggagttttaatttaaatgctcagacacattacattcactgtatttataacaacatcaatgaatactaacaatgccggacaggagtactatcaggcattcgttttatacgatcggttaatgtttcaggaaagctcttcgcatatcttggggaaagtaaatgtaatacgctgttcttaattgttcagtgctcaccccccagagtatagctcattccattattcaacttagctccatataaagggacagataatggaaagcctcagtgaaggaaccacagcaggctaccagcaaatccacgacggtattattcatctggtcgatagcgcccggacggaaacggtacgtagcgttaacgcgttaatgaccgcgacgtaccaggaaattggccgacgaattgtcgaatttgaacaaggtggcgaggccagggctgcgtatggtgcgcagctaatcaagcgactaagtaaggatttatgtctaaggtataagcgtgggttctctgcaaaaaacttacgccaaatgaggcttttttacctcttttttcaacatgttgaaattcaccagacaatgtctggcgaattaacaccattgggaattccgcagacaccgtctgcagaattcccaagcgcaaagatttggcagacgctgtctgccaaatctttccccttgcccaggtccacctacgtccgtttactttccgttaaaaacgctgacgcccgcagcttttatgaaaaagagacgctccgctgtggctggtctgttcgccagctagagcggcaaattgcgacccagttttatgagcggacactactgagtcatgacaaaagtgccatgctgcaacaacacgctcctgccgagacgcatattcttccgcaacaggcgatacgcgatccctttgtgctcgaatttctggaattgaaagatgaatatagtgaatccgattttgaggaggcgctgatcaaccacctgatggatttcatgctggaacttggggatgattttgcctttgttggtcggcagcgaaggttacgcattgatgacaactggtttcgtgtcgatctgctgtttttccaccgccgtttacgctgcctgctaatcgtcgatctaaaagtgggcaaattcagctatagcgatgccggacagatgaatatgtatctcaactacgccaaagagcactggacgctaccggatgaaaatccgcccatcggtctggttctctgtgcagagaaaggagccggagaagcgcattatgctctggcaggtttgcctaacaccgttctggcaagcgaatataagatgcaactacctgatgagaaacgactcgcagatgaactcgttcgaacacaggcggtgctagaggaaggctatagacgccgttaatttcagcggtttcgaattctgcagacagtgtctgcagaatctttaaaacgaactaagttttaagccattaaatcagccttaaccttcaccacaacctttttaatctctccaggctcgccgacaacgcatcctggtttatgcggttcacctggcataaacacggcgaacattcccggttttaagatgatggcttgctcgttatcaatggtgctgcaaagctgataatcatcctcatggtggaactcttcacactgacgcgcagtgcctgccatgccaaacagaatccgttcctcaccgtttaataacagctggatatcaatgtattgctcgtgcaattccgcttttttctcgacggggctttgagtgttaaacgtcatgacattcataaagatattgtcgccctgtaattcgtaacgacccggcgctttttcttgcggtctggcagctaatgccagcgttaacgcgtcctgtaacgcaggatgtaacccagcagacggtaaactctgtacttcacccatcatcataatttttctccctgggccaacagcgtagccccaagtaaacctgcatcatggcggtaatgcgccgccagtaaatcaacatgaaatgccgctggctcctgcgccagatacgtttccaccagcgccagatacccttctgccagaccaacgctgccaccgaccaccacgcactggcaatcagttgtggctttaatatcagcgatcagccttgcaagcgtacgtgcggagcggtgaatcagctgctgcgcctgctcgtcaccctgcccggcgcgcgtgaaaatagttttcgcatccgcgccagccaactccccctgcgctgccgctgcaatgccgcgaccagaagcaatcgcttccacgcaacctgtgcgtccacagccgcagactgggccgtgtggatcggcaagcgtatgcccgatatgccccgccagaccgccagggccggtaagcagtttgcagccgctcactacaccgccgccaacgccggtggaaacggtgataaagaccatatcggttatatcgccatccagcgcctgaaactccgcccatgctgcggcctgcgcgtcgttaatggcaatggtcggcaaattggtaagttgttccagcgttttgactaacggaaagtgtagcaatccaccaagattatgcggattaagtgccagcaagctgccgtcacggattatcccggtgctagcgatggcaacccgctgcgcatgagcttgcaacggagagactaatgcggataaggcatcacgcaaggcttctggtgtctggctggctggcgtaggaagttcacgacgatcgcggatctgcccgtcagcgccaatcagcgcggcggcaagtttagtaccgccgatatcaatcgccagtgtggtcatagcaccgcctttttcatcgctgtgttgtaccactgacaaatgtgctcaagacgcgtgattgcagaaccgaccgtcaccgcccacgcgccgtggcgcatcgcatccgccgcctgagcaggcgtgttgtaacgcccttcggcaatcacccgacatccggcgtcgctcaacgttttcaccagcgccagatccggctcttctggcgtttcaggcgtggtatagccagaaagcgtagtgccaataatttcggctcccagcttttggcatgccaggccgtcttccggcgtactgcagtcggtcatcgccagtaaaccgtgatggtgaatacgtgccagcagcgtttcaacaggcaccggacgcgggcggtcggtgccgtcaatggcgataatgtccgcgcccgcctgcgccagcgcatcaacatcttcaatataggccgtgatgcgtaccggagaatcctccagatcgcgtttcacaattccaataatcggcacgctcaccaccgcacgcgtggcttgcagatttgccacaccttcaatgcgaatggcaaccgcgcccgcctgttctgccgctaatgccatggcggcgacgatttcgggtttatcgagcgggctgtccggaaccggctggcaggagacaatcaggccaccgttagcagcgattttttgatccagttgtgcaagtaagctcatacatcttcccttagcgaaaggcccggtacatagaccgggcaacaggattaacttttggttttgactaaatcgtttttggcgctgccaaacggcacggcaccgctgaatggtttaccgtcgatagcgtcatgagtacgcaacgcttccgggcgcaaccaacgctgaacgcgagaaggcatatccagcccaatcagcaggatcaccacgaacgtcagactgaagctgaggcttgccagcgcagtacccagatccagacgttgagcgatcaacgcgccgatgattggggccagtgcaccgcccaatgcgccaacgttgtaggtaaagcccaggcccgctgcacgctggtcggtatcgaaataaccgccaatcagttttggtaagatcccggcgatcccttgtccaagcatttgctggaagaacagtaacagaccgagcacccagacgtttgcgccgccaatcgcaaataccggaataatcagcagctggctggccagcaggctacaaacgtacgctttgcgggttcccagccagtcaccgaggaagccacctacgcagcatcccaccgccgcgccaaagccactaaagaacagcacattggctacagtatgcgggttataagccagatcggttttcagatacgttggcagcagcgcctgaatcggccaactgtagaggaaagcaaacaacacgaccaccatcagcattacgcccgttggccagcgtttgcctgcactctgcaccataaagctgataaagattgcggcgcataacagcccaagaacagcgacgatcgcggcattttgcaggttaccggcgaagcagaaccacagcgcagtagccgccgccagtgtcattacgatattggcaatgcgatgttcaccacggtagagaatatccaccattgtgcgtactggtgctttacctgcgtgtttctctttccagtcttccgcttccgggatgtttttacgcagccagagagcaaagatgattggcaaaatgccgataaagaacagcgcacgccagccccagaccggaaccaccaggctatagacctgagcggcaacgacggcccccacagagaagccactaatcaaaaaaccactggctttgttacgcagatgttttggccagctttcaatgacataggtggcgctggaaccgtattcacccgccatccccatgccgatgaccagacgagcgataaacatggtgatgtagcctggcgcaaagccgcaggccagcgtcccggcgctgaagagaacgatgctggtgaccattgccagacgacgcccgtagcggtcacccatagcgccgagcatcaggccgccgaaccagcgagagataaaggctgcagagatcagacttgccgcctgcaccgtcgtcagcccgaattcaccttgtacttcggtgagtaccagggcgattaaaacgaaatcaaaaccgtcaagcagatatcccaaccaggcagcggaaaatgcgcgccattgtgcacggttgagatggcgataccacgggatattctgggttgtagtactcattgtgagtctcccgcggtgggcgatgcccacacgctttggtatgaaaattgtagggtacagatgcgtttatttcccctcacccggtaggggcgagcgaggggaaacaactcacccgcgctcttgcatcaactgctgggccagcgccttcagttctggcagatatttttcatctaccggtccaaacggtttgcggcacagcggcacagaaacgacatccatataatggaggacagttttcaggccgcggaatacgcccgttttgatcagtaaatcaatgactttattgcattcagtttgcagtttctgcgcggtctggatatcgccttctttcagcgccttaacgatcccctgatagcgccagcccatgatgttgtaggtactgccgataccaccatcagcgcccgccagcagaccagaggcgaagatttcgtcgtaaccgttatagagcacaagatcaggatgttcacgacggatctgctccatctgatagagatcgccagaggtctgtttcagcgcacctacgccaggcaatgtaacaagtgtgttgatctgatccagggtcagttttaccccactcagggctggaatgttgtacaccaccatcggcaaaccatccgcgctatcaataattgcccgatagtgatcgcagtgttcttcaaagctgaaaggatagtagaacggcgtgacggcggagacggcatcgaagccataacgtttagcgcttgccgcaagttgttggctttcggcggtgctgacgcaaccgacgtgggcgatgagtttaatcttacctttcgcctcttcggcgacgatttccagtacctgttcacgctcggaaaggctttgtacaaaggcctcgccggtgctaccacccacgtataaaccgtcgatgccctgctgaatattgaactgaaccaggcgacgcagactcgctttatccagtgcttgttgttggtcaaaaggagtcaggagtgcagccattacgccacgtaaattcgttgccataaatacctctgaagtgatgcttgtctgataaacgatatacctttatacctgttataccagatcaattaagcaacaccccatacagaaagcttataatgcgatctgcttcactaaagtggcattatttctttttgttggtggtctgaccgaaagcgtgccaggtagcagagacgctgttgagatggctttgcaacgcacgatcggcttcgtcaggatcatgacggcggatcgcatcaacgatcgcaatatgctgttgataactaacgttgttatgttcgtgcagtgcctgatcggtaaccgttgggcgtgcggcaataagccagtcgagcagggcaacgtggatcgccatgaagattgggttaccggggatctccgccagcacgcggtggaaatcaacgtcactacgaatgaatgccgcgttgttatccaggctctgactgttgatttccagtgcttttgccagcaaatcgatttgctcatcggtggcatgttcagccgcatagcgcaccagactggattcaaagaacagacgtaattgttcgaaatgggcaatcccaccgggatgagaaaggaaatctttcgccatgccggaaagctcaccgatgatagtgtccgcagaaggacggctgacgcgagcgcgttcgccgttgtttatttgcaccagacctttgcgttttaacgctgccagcgcttcacgcacgctaggacgcccgacgttaaagaacgccatcagttcgcgttcagacggtaattgttcaccttcgccaaattcacgacggcggatcatctgttccagctcttcttccaccatttcggagagttttttacgcgccagcgggcggctacgcaagttgcgaccaattgcaggactagaatcttcggtttggctatcaaatgcgttcataaggcccattctgtaaggtcagtgtgattaacatcatcagtgacatcctatcacaggattgaaagtaggggaaaatggcagggttttctctttgtgcctcatcattaccataattaacggaataattaactattgcgaaaaattaatgtaacgcagataaaaacatcccgtttgaattatttataagactattcacgagcattatgaatattatgaatgtgttcttacaaaataatcataagcgcatattttttaatgaaaaatcacctcacctacaattaaaaacacgacatccgcaccataaatagccttgcaaaaaatataacatcgttgttttcaatctgccgtttatgggattgaccgttttcttttgacacggagttcaacaatgttcggcataattatatctgtcatcgtattaattacgatgggctatttgatcctgaaaaactacaaacctcaggtggtgctggctgccgcaggtatcttcctgatgatgtgcggtgtctggttagggttcggtggtgtactcgatcccaccaaaagcagcggctacttgatcgtcgatatttataatgaaatcctgcgcatgctgtccaaccgcattgccggattggggctgagcattatggcggtgggcggttatgcccgctacatggagcgcataggggccagtcgcgcgatggtgagcttgttaagccgcccgttaaaactcattcgcagcccgtatattattctgagcgcaacttacgtcatcggccaaatcatggcgcagtttattaccagcgcctccggtctgggtatgttgctgatggtcaccttatttccgacgctggtgagtctgggagtaagtcgtctctctgcggtggcagttatcgcaaccacgatgtccattgagtgggggattctggaaacgaactccatttttgctgcccaggtagcgggaatgaaaattgccacatacttcttccactaccagcttccggtcgcctcttgcgtcattatcagcgtggcgatctcccactttttcgtgcaacgcgcttttgacaaaaaagataaaaatatcaatcacgaacaggcagagcaaaaagctctcgataatgtcccgccgctctattacgccattttacctgtgatgccgttaatcctgatgctcggcagcctgttcctcgcccacgtcgggctgatgcagagtgaactgcatctggtggtggtgatgttactgagtttgactgtgacgatgtttgttgagttcttccgcaagcataacttgcgcgaaacaatggacgatgtgcaggcgttttttgacggcatgggtacgcagtttgccaacgtggtaacgctggtggtcgcgggtgaaatatttgcgaaaggcttaacgacgattggcactgtcgatgcggttatcaggggggcggagcattctggtctgggcggtattggcgtgatgattattatggcgctggtcattgccatttgtgccattgtgatgggctctggcaatgcgccgtttatgagttttgccagtcttattccgaatatcgcagccggactacatgtaccagcggttgtaatgattatgccgatgcattttgccacgacgctagcgcgcgcggttagcccgattactgcggtggtggtcgttacgagtggaattgcaggcgttagcccttttgcggtggtgaagcggacagcgatccccatggcagtcggtttcgtggtgaatatgattgccacaatcacgctattttattaagtcattaaaaagacaaaacaggccgcctgggcctgttttgtattacttcacaacgcgtaatgccggtcgaccaccgcgtggtggctgcggaggttcatcgtcaggatgagtgtcatcatcgtgatctggcttgtcgccatcaataacgctcataacggtttcgttgtctgcgcttgcctcttcatcattcatgatgctggtatcttcatcgtaggcagcttcaggctcaaacatcgtgcctgcgccattttcacgggcgtagatagccagcacggcagccagcggcacagaaacctgacgcggaatgccaccaaagcgcgcgttaaagcgcacctcatcattcgccagttccagattgccgacagcacgcggcgcaatgttgagtacgatttgcccgtcacgcgcatattccataggaacctgcacgccagggagcgtcacatccaccaccaggtgcggcgtgagctggttatccagcaaccactcatagaatgcacgcagcagatagggacgacgtggtgttagctgactcaaatccatacagattaactccggcccagacgcatttcacgttctgcttcagttaaagaagcaaggaaagagtcacgctcaaagacgcgggtcatatagcctttcagctctttcgcacccgggccgctgaactcgatgcccagttgcggcagacgccacagcagcggagcaagatagcaatcgaccaggctgaactcatcgctcaggaagtacggcttctgaccgaagaccggcgcaatcgccagcagttcttcgcgcagttgcttacgtgcggcatctgcttcagaagcactaccgttgatgatggtgttcatcagcgtgtaccagtctttttcgatgcgatgcatgtacagacggctttcaccgcgagctaccgggtaaacaggcatcagtggcggatgcgggaaacgctcatccagatattccataatgatgcgagattcccacagggtcagctcacgatccaccagggtcggaacgctctgattcgggttgaggtcaatcagatcctgaggcggattgtccttttccacgtgttcgatctcgaaacttacacctttctcagccagcacaatgcggacctgatggctatagatgtcagtaggaccggaaaacagcgtcattacgctacgtttgttggcagcgacagccatgaaaacctccaggtatagtcagaatttttactgctaccagccaccaggtggccagtcagaagttgtgttacccaataaggaacgactctctttgttcgaaaatcaaacaaaaaatgagcaatacccgacatttgggcagaaaattggatgatagtttaccagattttgcgaccattgtggtgagtcgatgccggaaatggggaaaaagagatgcgctttagtctgaaatagttgacttagtcccttattggcgatgtggtttttgttttacctgtctgtcaggtggcagcaaaaagcaactttccagtttttacgctgattcagattttagctataaaaaaacccgccgaagcgggttttttcgaaaattgttttctgccggagcagaagccaattaacgtttggagaactgcggacgacgacgtgctttacgcagaccgactttcttacgttcaacctgacgagcgtcacgagtaacgaagccagctttacgcagttcagaacgcagggactcgtcgtattccatcagagcgcgggtgataccgtgacggatcgcaccagcctgaccagagataccaccacctttaacggtgatgtacaggtccagtttctcaaccatgtcgaccagttccagcggctgacgaactaccatgcgggcagtttcacgaccgaagtactgttccagagaacgttggttgattacgattttaccgttgcccggtttgatgaaaacgcgagctgcggaacttttgcggcgaccagtgccgtagtattgattttcagccattgcctataatcccgattagatgtcaagaacttgcggttgctgtgccgcgtggttgtgctcgttacccgcgtaaactttcagtttacggaacatagcacgacccagcgggccttttggcaacatgcctttaaccgcgatttcaatcacacgctcaggacggcgagcaatcatctcttcaaaggtcgcttgtttgataccaccgatgtggccggtgtggtgatagtacactttgtcagtacgcttgttgccggttacagcaactttgtcagcgttcagaacgatgatgtaatcaccggtatctacgtgcggagtgtattccgctttgtgcttaccgcgcaggcgacgagccagttcagtagccagacggcccagagttttaccggtcgcgtcaacaacataccagtcgcgttttacggtttctggtttagctgtaaaagttttcattaaaagcttacccaataaatagttacacgttggtgaacacccaaacgtcttcaattgttgaggttcacacgacaaagtccggcaaacctaccccttcgaatagcctatgccagcacacaaaaagttttgggaaaaaaactttcttgtaacgtggggtcgcaggattatagagaagtcggggtcaaagatcgacccctttttgtgatttgtgacaggttttaacccgccaaatgctcgcgcttcagatactcttcgctttgcatctcttgcagacgactcaggcaacgctggaactcaaacttcagccgatcgccctgataaatttcatacagcggcacttctgcactcaccactaatttgacatggcgctcgtaaaactcatccaccagcgcaataaagcgccgcgcttcgctctccatcaaccgcgtcataactggtacatcaaacaacatgaccgtatgaaagagacgactgagcgcaatatagtcatgctgactgcgggcgtcgacgcacagcgtagtaaaagagaccgccagcgtctggttctcgacgcccattgttgctaatggccgatggttgatttctaacgtcggactattttctcgtttcccccccgccagcgccaaccatagtttatccatttgcgcccgggtttcatcgtgaagtgggctaagccacagatgcgcctgagtgagtgtacgcagacgataatcaacaccagcgtccacgttcattacatcacaatgctgtttaatggcatcgattgcaggcagaaaacgcgcacgttgcaggccatttcgataaagttcatccggcggaatattactcgtcgctaccagggtaataccgcgagcgaacagggctttcatcagaccgccaagtagcatggcatcggtaatatcagaaacaaaaaattcgtcaaaacagagcacgtcagtttcggctttaaagcgatcggcaataatttccagcggatcggtctgcccctgtaaggcagttagctcttcatgcacccgcagcataaaacggtgaaagtgcaggcgctgtttccgctctcccggcaggctttgatagaaaaggtccatcagccaggttttcccgcgtcctacaccgccccacatatataagccacgcactggcgtatgctttgtgtcttcgcgtttaccccacagcttaccgacccgcgccattagcccactcgtcctgggggctggtggcgtgctattgatgagttcctgataaataatttccaggcggctgacggcctctttttgaacgtcgtcgggttgatggctgccttcattaagcgccttcaggtattggcttgttggggtaacgctttgcatgatcttattgttattccttgaataatcggtgcgccgttgttcacggttgacgaaaaaaaggccgttctacactacgcgatatgcagtcgggattccacttctgtggaattaacggttatagtggcataatcagccgcaggcatggagcctgaagccaacaccctacggaaacaaaagacaacgggagatgttcatgacctgggaatatgcgctaattgggttagtcgtcggcatcattattggtgctgtggccatgcgttttggtaatcgtaaactacgccagcaacaggcgttgcagtacgaactggaaaagaataaagctgaactggacgagtatcgcgaagagctggttagccactttgcccgcagcgcggaattactggataccatggcgcacgactatcgccagctgtatcagcacatggcaaaaagctccagcagcctgctgccggaactgtctgctgaagcaaacccgttccgtaatcgtctggcagagtctgaagccagcaacgatcaggcaccggtgcagatgcctcgcgactattctgaaggcgcatccggcctgctgcgtactggcgcgaagcgcgactaatttatttttcgggcgcagccattgcgccctcctcttctctccctccccgactatcatttaatctggtgtctcattgttagccgtctgaaaattcaataacatcaaactgttttgaatctcttttcttatcattcaggtacgagagcaggaataatgaaaaaacaaacccagctgttgagtgcattagcgttaagtgtcgggttaactctcagcgcgagttttcaggccgtcgcgagcattccaggccaggttgccgatcaggcccctctccccagtctggctccaatgctggaaaaagtgcttccggcagtggtgagcgtacgggtggaaggaacggccagtcagggacagaaaatcccggaagaattcaaaaagttttttggtgatgatttaccggatcaacctgcacaacccttcgaaggtttaggctccggtgtcatcatcaacgccagtaaaggctatgtgctgaccaacaaccatgtgattaatcaggcacagaaaatcagtattcagctcaatgatgggcgcgagtttgatgcaaaactgattggtagcgatgaccagagcgatatcgccctgttacaaattcaaaacccgagcaaattaacgcaaatcgctattgccgactccgataaattgcgcgtcggtgattttgccgtagcggtcggtaacccatttggccttgggcaaaccgccacctctggcattgtttccgcattaggccgcagcgggttgaatcttgaaggtctggaaaactttatccagacagatgcttccattaaccgcggtaactccggcggtgcactattaaaccttaacggtgagttaattggcatcaacactgcaatccttgcgcctggcggcgggagcgtcgggattggatttgccatccccagtaatatggcgcgaacactggcgcagcagcttatcgactttggtgaaatcaaacgcggtttgttaggcatcaaaggcaccgagatgagtgccgatatcgccaaagccttcaaccttgacgtgcagcgtggcgcgtttgtcagcgaagtgttgccaggttctggcagcgcaaaagcgggcgtcaaagcgggcgatattattaccagcctcaacggcaaaccgctgaatagctttgctgagttgcgctctcgtatcgcgaccaccgagccgggcacgaaagtgaagcttggcctgctgcgtaacggcaaaccactggaagtagaagtgacgctcgataccagcacctctagcagcgccagcgctgaaatgatcacgccagcgctggaaggtgcaacgttgagcgatggtcagctaaaagatggcggcaaaggtattaaaatcgatgaagttgtcaaaggaagcccagctgctcaggctggcttgcaaaaagacgatgtgatcattggcgtcaaccgcgatcgggtgaacagcattgctgaaatgcgtaaagtgctggcggcaaaaccggccatcatcgccctgcaaattgtacgcggcaatgaaagcatctatctgctgatgcgttaatgtcgtaaaccgggcatcaggcttacgtgtgatgtccggttaactcgtggtatgctgctgccgttcccttttttaatgacgcctccatcatgtttgtgaagctcttacgttccgttgcgattggattaattgtcggcgctattctgctggttgccatgcctagcctgcgcagccttaacccgctttccactccgcaatttgacagtaccgatgagacgcctgccagctataatctggcggttcgccgcgccgcgccagcggtggttaacgtttacaaccgtggtttgaacaccaactctcacaaccagcttgagatccgcaccctgggatccggtgtaatcatggatcaacgcggttatatcatcaccaataaacacgtcatcaacgacgccgatcagatcatcgtcgccttacaggatggacgtgtatttgaagcattgctggtgggatctgactctctaaccgatctggcggtacttaaaattaatgccactggcggtttacctaccattccaattaatgcacgtcgcgtaccgcacattggcgacgtagtactggcgatcggtaacccgtacaacctcgggcagaccattacccaggggattattagtgccacgggtcgaatcggtctgaacccgaccgggcggcaaaacttcctccaaaccgatgcttccattaaccacggtaactctggcggcgcgctggtgaacagcctgggcgaactgatgggcattaatacgctgagctttgataagagtaacgatggcgaaacgccggaaggtatcggctttgcgattcctttccagttagcaaccaaaattatggataagctgatccgcgatggtcgcgtgatccgcggctacattggtatcggcggacgtgagatcgcaccactgcacgcgcagggcggtggtatagatcaactgcaagggatcgtggttaatgaagtgagtcctgacggcccggcggcgaatgcgggtattcaggtcaacgatctgattattagcgtggataacaaaccggccatctctgctctggagacgatggatcaggtggcggaaattcgccctggtagcgtgatccctgtagtagtgatgcgtgatgataagcagttaacgctgcaggtcaccattcaggaatatccggcaaccaattaagtcgtgcgctcaaaacaaaaaaccggagtctgtgctccggttttttattatccgctaatcaattacttattaacgaactcttcgcccagggcgatatctttcttcagcgtatccagcataccttccagcgcgttctgttcaaatgcgctcagggtaccgatagatttacgctcttccacgccgtttttacccagcagcagcggttgagagaagaaacgggcgtactgaccgtcgccttcaacgtaggcacattcgacaacgccttgttcgccctgcagtgcacgaaccagagacagaccaaaacgtgcagctgcctggcccatagacagggttgcagacccgccaccggccttcgcttcaaccacttcagtacccgcgttctggatgcgtttggtcagatcagccacttcctgctcggtaaaactaacgccaggaacctgactcagcagcggcagaatggtaacaccagagtgaccgccaataaccggcacttcaacttcgcctggctgtttgcctttcagttccgcaacaaaggtgttggaacgaatgatatccagcgtggtaacgccgaacagtttgtttttgtcataaacaccggcttttttcagcacttcagcagcaattgcaactgtggtgttaaccgggttagtgataataccaatgcacgctttcgggcaggttttcgcaacttgctgtaccaggtttttcacgatgccggcgttaacgttaaacaggtcggaacgatccatacccggtttacgcgctacgcctgcagagataagaacgacatctgcgccttccagcgccggagtcgcatcttcaccagaaaaacctttgattttcacagcagtagggatatggctcagatcgacagccacaccgggagtcactggagcgatatcatacagagagagttcactaccactaggcagttgggtttttaacagtagtgcaagcgcctggccaataccgccagcagcgccgaggactgcgactttcatcctaaactccttattatattgataaactaagatatgttgctccgctgccgcgaccttaatccacaaaattgccgtttacaatgaccacatctcaagaatgtgtagtcacgcaagtttagcgtttatgcatttaattgccgtaatcaggaacctaacttacgtaattaacagtcgcttatgcattagcgcaacattccaacaggtggtgacaatataccctaccgttcagccaaaacaacatcaatttgataacaattaatttacttttaagcagaatttgcatgccgtgacgcaggcatgtttctcaataacgaaatttgataaaatcccgctctttcataacattatttcagccttcttcagggctgactgtttgcataaaaattcatctgtatgcacaataatgttgtatcaaccaccatatcgggtgacttatgcgaagcagcgctaagcaagaagaactagttaaagcatttaaagcattacttaaagaagagaaatttagctcccagggcgaaatcgtcgccgcgttgcaggagcaaggctttgacaatattaatcagtctaaagtcagccggatgttgaccaagtttggtgctgtacgtacacgcaatgccaaaatggaaatggtttactgcctgccagctgaactgggtgtaccaaccacctccagtccattgaagaatctggtgctggatatcgactacaacgatgcagttgtcgtgattcataccagccctggcgcggcgcagttaattgctcgcctgctggacagtctgggcaaagcagaaggtattctgggcaccatcgctggcgatgacaccatctttaccacccctgctaacggtttcacagtcaaagacctgtacgaagcgattttagagctgttcgaccaggagctttaatctctgccccgtcgtttctgacggcggggaaaatgttgcttatccctctcaaccccctgctttcccctgcgattaatttaacgaatagtgcgttttactgcgacatgtcattcacacaatgaatacataaggtaaaaaaagcacattatgcaaaattcattatctaattgaaaaaactagaattaacgataaataaccgtatttttaattcttttttgttattaaaattcacatttttaacacttagtatcaactgaaacagttagcgcggtattaattagctcaataattagtgtatacttgattttgtgatatgggtcacgaaacaaaggcccagctaaaagattatgtcgaggtaaaaatcatgaaaatcaaaaccactgttgctgcattaagcgtactttctgttctctctttcggtgcattcgctgccgactccattgatgctgcacaagcacaaaatcgtgaagcaatcgggaccgtatccgtaagtggtgtggcgtctagcccaatggatatgcgtgaaatgctgaacaaaaaagcggaagagaaaggcgcaacggcctaccagattactgaagctcgtagcggtgacacctggcacgctacggctgaactgtacaaataaaccctcatcgtcttgtccgacgatattgcccccggttcgggggcttttttttgcgttaatgacgaacattaaaacgcaaatgcccttccagctcttcctctgcctcatcaaacagcaatattaacgcgccaaaacggcgacgcgttttctctcccagatgaacaaattcaatctcaagtggtagcggcaggacatcgttcattaacacatcccatagactgtcgagatcgcgtaccttatctttcgccagaccaaaggtttggctaaagtcacgataaaaatcctcctgactctcaatctcatcaaaatcaaaggtataaatattcatctgttgccaccgtcacgtttcgcggcgagttctgccgtgcatcgctaagtatagccatgaaaaaaccgacgcttttggcgtcggttttgacttaactatcggtcaacgcatgttgatacttatggagcatccccgccagccgatttaccggttccgtcacctgcggtggcgcttgccagatgcgtagcttttcctggtagatttccagttcttccagcaactggccaaagtaccgacgacgtttatcatcgctacgggcagatatcacatggtctgctgtgcggcgcatttgtcggtgaaacgcgcttaaatcctcgttaaccgggatcggtgcatcacgcaggcgctggtgcgcgataatcatcgtcagcgccaggcgaaatttcggcaaatcccctgggaacttattcatcagcaaaaacagctgctgataaagtgccgggaggtggttctctttacgacgtgccacattggtagtcatcgcggaaacagcggcagaaacaaactgattaagcagtacacgtccggtcctgtcgcggcttttatcccgcaccagcaaaataacggtgaacgcgagcacacagccgacgatttgccctaatgcgctgtcgagaaactgactgaaatggaaagtcatcgggttatccagcacgataatatttatggtgctggccagtgcccccatgctgcccagtcgccgtttctgtacttctataccgaggaagaatcccagcactgccaggctaatgcacagcagcaacatgctctgttgggtattagggataatcaccaaaaagtagagcagccctaacggcagcgcggccagcgtcccgtagataaagtcgatcgccaccatgcgtggattcggcaaacgcattgccagactcgtcactaccgcaatcatcaccattgcaccactgccggaagtccagcccgtccacagccagaaaagcgtgcccagaatgcaggaaagtgtggttcgccagaagttacccattgcatgatgacgttcggcactctctacttttacttccggttcgccttgcaggatctcttcttcggtggcgttgatttttgtgttactgataacgccgcgcttgagaagctgataacgcgttgccgccgcgacccagctataaatggtgacaggcgtttcccgttccccggtccaggcgataactctccgcaggcgtttgagctgcttgtggacgtcctgcgcggtttctaccggcgtgtcaaaaaattcgcggaaagtatcagtgatcaattccgggcgcgtattctgaataagataagtttcgcaggattgggtaatcagcgtcaggcttagcgtattgatcgcttttaaacgtcgattggcccgcgcccagcgggaagattccatattcaggttgctgcgcatgccttgtagcgccgtggtgcgtcgcaccaggtcgccccaggctttatcgacaacttcaccatcgccatgcttgatacagagttgcattaattgatattgcgcgaccagcaaactttccagctctcgatccacttcttgtttgatgcttcgcggagaaaagagcaaatccgccataatcgcacacacaataccgataacgatctcgctacaacgttcgacggcaaactgcggcgtaagcaatggttccggctgaatggtgatcacaatgatcagcgcggtataaccggccagcccccacgcatagctgttttctattcgtaccaggctggatatccaggtacaaaaaccggcccagatacagcacaccagaatcatcaataatggtgcgcggatcatcgcaatgatgatcaccagtccggcaatacagccaataaatgtgccgatgatgcgcaaaaagccacgatagcgaatagcgccagaatacggttcacctcccgcagcaaaggccgtaccggcggcaacaatcgccgctgtcagtaccgcccagcgtggcgtttccagctggaagtgaaagccaacaaacagcgccagtacaatggcggtcgccagttttaccgcaaagcgaatatgttggttagcaatggagaaaatacccatcgtgattaaccaaactcacgcaggcgatgggccattttacggaagaagctatcctggctttcgtcgcgatcttgtttgccagtgaccaccactgtagcagtggtgcccgcaggccagatgttctcttgctggttgtcgagacgaatacgaaccggaacacgttgcgcaagacgcacccattcaaggttagagtctatagtcgccatccctttgtcgtcacgcgtgctgctggcgttggtgacccctgcggcaacactatcaacagtccctttcagcactttgttactgccaagcggcgtgatctctgcacgataccccggacgcaccccttccagcttagtttcttccatataggccagtacatagaaggagttctgtttcaccagcgcaaccgccgtacttcctcgagtaataaactcaccggtatagacgttgaggttggtcacccagccatctgctggcgcgcggatcaccgtgcgttcaagatccagttttgccagatcgcgggtcgcctgcgctttcgctaactgatgcagaaccgtttgtagtacgttgttggcctggtcgatctcttcgcgagacatcgcctgcacaccgagacggttacgacgtccggcctcctggcgtttctcctgtgccagtacctgataataagcaacatcggcttgcgcttcctcaagcgccttttgatagcgcggctggtcgatggtgaacagtatctgtccttttttcaccagctggttatcatgaacattcacctgggtaatgagtccagaaacgtccggcgcgatcgcaacgacgtcagcgctaaagcgcgcgtcacgcgtccagggggattcggtgtaatagacccaggcattaaaaattgcgatgaaggccagaatgactaatacgaccgtgatggccgtacgggagaattttcttattagtgttttcacttcaacctcaaacgaacagtcggcttatcaaataaaacaagcagcaatagagcgcggtgttgaacaacgccggatgccagacaaagtcgtagatacctgttggcacaagtacccggcgcaccagccagaaaatcgccagacttaaaagcaattcaaaaaatatcggtgggaaggacagcccaaacaccacgataacgggaaacagactcatgttgaccttggttgtaaagagagagcaggcgttattattttcagcatctgtcgccgcagagaagggcatggaaagccgggcgagagcaacattgctgtagattgatatttaatatattagcgtaactgttatgctgttatctatattatgtgatctaaatcacttttaagtcagagtgaataatggaacgactaaaacgcatgagcgtgtttgccaaagtagttgaatttggctcttttaccgccgccgccagacagctacagatgagcgttagctccatcagtcagacggtaagtaaactggaagatgagttgcaggtaaagctgttaaaccgtagcacacgcagcattggcctgaccgaagccggtagaatttactaccagggctgccgtcgtatgcttcatgaagtgcaggatgttcatgagcaactgtatgccttcaataacacccccatcgggacgctacgcattggctgttctagtactatggcacaaaatgttctcgccgggctgacagccaaaatgctgaaagaatacccaggtttgagcgtcaatctggttaccggaattccagcccccgacctgattgccgacggtctggatgtggtgatccgcgtcggcgcgttgcaggattccagcctgttttcccgccgtctgggcgcgatgccaatggtggtgtgcgccgcgaaaagctatctcacacaatacggcataccggaaaaacccgccgatttgagtagtcatagttggcttgaatacagcgtgcggcccgacaatgaatttgaactgatcgcaccggaagggatcagcactcgcctgatcccacaaggaagatttgtgactaatgatccgatgacgctggtgcgctggctgacggcgggtgccgggatcgcctacgtgccgctgatgtgggtgatcaacgagatcaatcgtggggagctggagatcctgctgccgcgttaccagagtgatccacgcccggtttatgcgttatataccgaaaaagataagctgccgctgaaggtacaggtcgtgatcaacagcctgacggattattttgttgaggtcggtaaattgtttcaggagatgcacgggcgcgggaaagagaagtaattcatattgtactgttacgttgtacaaacctgtgccaacgggttcccctcaccctaaccctcaccccaaaggggcgaggggaccgttcgtgcacgtagaaagattaattatccttctgaaaatagtgaaattattacgcagtaccgccaacagtcaggttatcgactttcaacgttggctggcccacgccaaccggcaaactttgcccttctttaccgcagacacccacgccgttatccagtttcaggtcgttgccaaccatgctaatctgctgcatggtttcgataccggaaccaatcaacgttgcgcctttcaccggcttcgttactttaccgttttcaatcagatatgcttcactagtggagaaaacgaatttgccggaggtgatatccacctgaccgccaccaaagttcggtgcatagataccgtactcaacggattcaataatttcctgcggggtgcttttacccggcagcatataggtgttggtcatacgcggcatgggcagatgggcgtaggattcacggcgaccgttgccagtcggcgtcatccccatcaaacgcgcgttgagtttatcctgcatgtagcctttcagaatgccgttctcaatcagcacgttgtactggcctggcgtaccttcgtcatcaatcgccacgctacctcggcgatcgaccatcgtgccatcatcaaccacggtacacagttcactagccaccagctccccgacctgtccactaaatacactagtgccacggcggttgaagtcgccttccagaccgtgaccaaccgcttcatgcaacagcacgcccggccaacctgcgccaagtactaccggcatggtgcccgctggtgcagcaacggcagaaagattgaccagcgccatacgcactgcttcttttgcccatgcatccgcacggacttcgccgtcgagatcggcaaggaagaattcataaccaaaacgaccgccgccgccactggcaccgcgttcgcgtttgccatcttcttcgacgagaacgctcacggaaagacgcaccagcggacggacatccgccgctagcgtgccgtcggtggccgcaaccaaaattaattcatagacaccactgaggctggcagtcacttcctgtacgcgcttgtccgcttcgcgggcaaccttatcgacgcgacgcaggatatccagcttctcttcacggctcatgctttgcagcggatctacgctggtatacaacgggctatgctctaccgcgcccagcgtctgtactttaccatcaccactatcacggacgatggtgcgcgccgcttgcgcactctgttccagcgccagcaggctgatttggtcagcgtaagcaaatccggttttttcaccgctgattgcacgcacaccaacgccctgatcgatgttgtaagaaccatctttaataatgcggtcttctaaaacccaggattcgtgatagctgctctgaaaatagagatcgccataatcaaggcgacgttcggccagttgaccgaggatcgcgaacaagtcctgatgtttcaggccgttcgccgctagcaattgttcacttaccaggttaagactcatcgtttttgctactcgttagttactgcagtagaggattttttacggctgccggatgcggcgtgaacgccctatccagcctacggttatgttccggtttgtaggcctgataagacgcacagcgtcgcatcaggcaacggctgtcggatgcggcgtaaacgccttatccgacctacggttatgttccgtttgtaggcctgataagacgcacagcgtcgcatcaggcaacggctgccggatgcggcgtaaacgccttatccgacctacggttatgttccgtttgtaggcctgataagacgcacagcgtcgcatcaggcaacggctgccggatgcggcgtgaacgccctatccgacctacggttatgttctggctcgttggcctttggcaacgattatcctatgagattggggcaattacgcgccctcgtcaaatcattgcgctttttctttacgcggttggcgcaacacttcgttgatttgcggatcgtccagcggaccgctaatgtgatagcgcaaaatggagactttgctccacagcggccccagcactttactggcggcaaacactgccgcgccaacaatggggttaaccgcaaaagccgcagccacgcccaccgtcgcagaaatctctggtgcgacaaccgcttccatattcaggtcgcgacgtaccagatttacgctccctttcatggcgatatccgcctccaggccatccaccagcgtgtcgtcggtgtgcataacgccgtctttaatccacgcggtgctgcgaatggagtcaaaatagaacccttcgccaaaagtgtctctgaaatcaaaacgcagcttacgcatcagggcatctacgctcaataagcgcagcaattgcccggcatgtccggtattgatttcggtaatttcgcctttacccagttgagtatgaatgatgccattcaacgtcgcttcatctggctgccagggtgctttgcgccagtgtaaatcgtaatccacattaaaactgctctggcgtatgggcgtcgtgacaccaaaaaattctgcggcggcatcaattttctgcccgcgcagttttcctttcaggctggtacgttcattccccggattattaacccattcaccatcggcagtaagccggctgaaaccagtatcaatcagtccattggtcagcgttaacgtatcgccagaaatggtgatatcactgtcaatgcgaccgaatttttgcccccagaaccagcactctgtgcatcgtatttgggcgtccggccagccacggaagttaatgcgctccgttgtcgggaaaggactactcggcgtactatcaccacgagttttcgccacgctcgggttgtaataaagatatttgatattcgccagccacggcgcgttattacgcatcgctagcgtggcgttgatttcacgcccttgcgcttcaaccagggtgccatttgccgtcggttggctaacaatactcaggttattccattgctgatttcccagactcaacataggcgtacgtaacgttatgtgttgtgggaaactcgctgcaccaccgacactctccgcagcgcctttctggaacagggccagccactcggcaccattcatcggcggcatattgagttcaacgccactttgttccggcaacggcgggagcgttttactgtctgccgcccaaatagcacgatcgagcgtcagcttttgaccgagcaaccagcggctattgaaatgattatccgcaccagcctgtccggttaattcaaagctgttgagattgccatcaaccttaacgtttaccgctagtggttcacccgcaggtttggctaacggactaggtaagtgactgctcacattctttagatcgccgttcagctctatgttataggtcgcaccagcatgataaggcagatcaatgcccactttaccatcccacgccacgctgccactcaatgcttcgttcaccgcttcaggcagaacgccggttttcgccggttgccagttaccgttgaggtttaccgctacctggtaggcttttgccccttctttggtggaaaaatccacgttcaacggctgattaaaccagcttgctgtcagtggttcactttgcagatcgctattgataaagctgaatttaccgctcaaatttttcagggtgctgtcgagtggtttgataaacagactgttattacgcagcgtcacttcacctttcgcggttaccagttcgccgttcagcgggatatcaagatgtaagcgagcattcacatcgccgtcgagctggagttcttgcagggtcgcacccagagaatctttcagcggtgtctcatcaaagtaagggccaacggctttacccggacctttaatgtcagcgtcaatcagcagtttttctttactgtagtcagggatcactgcggtaagattactcgcgcgcacgccgcccagattaacgccatcggttttcatccataaaccgtcgttaataaagtccagttcaatatcaaggttagttaatgcaggccagtccggctggaaggcaaacttcgcgttgcgcagcggcaccagcacttcaaactgaccttcgttgtgtttataggggaagagttgcggattgccaccataaaccagcgtcgcgttatccgcttcaccgccctgaatcgcgccacttaagtaatcaaccaggtctttacccatcaagttttccgggaaatagcgccaggcttgactaccatcatcggtactgatgccagccagaatacccagccagggttcatcgttagcaggttgcaggtaacgaaaaccgccgcgcgcatggacggctttggctttaacgtcaatattacgcccatccagctggaaacctttgttattgttcagccagcttatagttgcctggccgtcggcgatttctagtggcgcacggaataccgtttcgtaaggcatctttgcctgcttcatgctcgcggtaagcaaaccattttcaacgctgccggaaagcgtcccggagaagtgttccgcacccggtaataatttccattgcttccaggccagatcgctccagcttgcctgaaaacgggtcttgtctgccgcctgaagcgggatatccagcgccagagtgttaatcttgccgctcggttgtgtggagcgccaaacatcacccagtgcaggactaagtttcgcggccagcgggcgtatgccctccaggcctgccagctccagattactggcgcgaatccggagttcgtcactgcgtttattgtctttgccgccaacgtcctgttccggtatccaggccagcgtcaatgctccgctcggccagggtttgccgtccatcgtgatccgtgtatcgggaatagagaactgccagcccggattttcacgcgtaatatgcgcggtcagattatccacgctcagcgtatgcgtttgcttctcgcccaaccagctggcaccgccctgtttcagccagacgtcaccgccggttacatcgcctttgtcgatcgtcatccagccttcaagggagaactgtgccgtttccagcgcaatattgtcctgcatccatttaccgagccacggcttcaggtcgatgtcatccgcctggagccagacgcgaccattgcttaacaacccctcatcatcgcgcaaatccatgcgcacctgcatcacgccgtgctgtccggtaaggctggagaggcttaccaggccttccgcacggtgtcgacgtggatcgttcagccaggtgagttgtgggatcgccagctcggcgcgctgaccggatggcgtcaggaaactgacttcactgtcgcgaagatcgaaatggtcaaattgacgaagaaacagatcgctgatgtgactggcttccagactgtcatcactaccaccgctggtgataggagtgttggtgcgaaagcgcagctgccagaaagtgaggtcgcgaaactgccagcgcatatgtaacaggctctgccagacatccagcgccagagtaacgcgtttaacgctaaattcgccgccatcttttagttctgcacggatgtcgtgtgcttcaagcgtcgggccaaaattctgccagctggcactgagctgactggcttctaccggcatgccagtcgcggattctattttgttgaggatttccggacgccaggcgtcaagatgcggtaaagcaatacgcaggccgctaaccagcagggcagcgatcacaacgagcgcggctccagtaagcagtaaaatccccggcaatcgcctcacccgtcactccttgtctgctaaaaatgtgactcaaaaaccctttgccggatggcggcccagcatctgtttacatcattacgacgtcaaactgctcctggttatagagcggttcaatttgtactttaacctgtttgccaacgaaaatttccacttccgccaggctgtgactctcttcgcctttcaaggcttcagctactgccggagaagcatagaccaggaaacggtcggagtcgtaagcatggtggacacgaacaatctcgcgcatgatttcatagcataccgtttccacggttttcaccgttccgcgaccgtggcaggttgggcattcgttacacagtacgtgctcaatgctttcgcgggtgcgtttacgcgtcatctccaccagccccagcgcgctaaaaccattaacgctggttttcacccggtctttgctcaacgcctgctccaggctgtgcagcactcggcggcggtgatcttcattattcatatcgatgaaatcaataatgataatcccgcccagattacgcaaccgtaactggcgagcgatagcctgcgtcgcttcaatattggtattgaaaatggtgtcgtccagattgcgatgaccgacaaacgctccggtattgatgtccacggtggtcatcgcttcggtctggtcgataatgagataaccaccggatttcagttctactttgcgttccagcgctcgctggatttcgttttcgacatcaaagagatcgaaaatcggctggcgtcctgtgtaatgctccagcttgcttgtcatctcgggaatgtactcgctggtgaactcaagtaacgcttcgtaagtcaggcgactgtcaacgcgaatgcggtccagttcggcatcggcgaaatcacgcagaacacgctgcgccagcgccagttcgccgtacagctgataacgggtctgcgggcgttttttacgctccataactttggtccagacgcgtttcagataagcggcatcggaggccagttcagcctcgccaaccccttccgctgcggtacggatgataaacccgccctgctcgtcgcaatactctgcgaccacttttttcaggcgttcacgttcactttcgctttcaatacgttgggaaaccccaacgtgagaagcccctggcataaacaccagatagcgagaagggagcgtgatatcggtggtcaggcgcgcacctttagtgccaagcggatctttcaccacctgcaccatcagatcttgcccctgacgaaccagttcgctgatgtcgcgcaccgtgaattgcttttgttcttcacccgccacacattcggtgtgcggcatgatgtcggatgcatgaagaaacgcggctttatccagcccaatatctacaaaagccgcctgcatacccggaagtacacgacttacacgacccttgtagatattgcctactattccgcgtcgcgcctcacgttcaatatgaatttcctgcagaataccgccatcaatatacgccactcgcgtttcgctaggcgttacgtttactaacaattcagccgtcatgtttatcccttttctcacgcagtgcgttaaaattacttaataattcatacgtttcaaccagcggtaagccgactacggcgtgatagctgccatttatcttcctgacaaaacagccacccagcccctgaataccgtatgcacctgctttatctaacggttcatcgctggcgacatagcccgcgatgtcttcgtctgttaacgttctgaaagtcacatcggtgaccaccaggcaatcgagaatgtgctggctgtcggccaacgccactgctgtcatcacctgatgggtctgaccgcttaatttgcgcaacatctgcgccgcatgctctgcgtcgcgcggtttctccagcacttctccgttcaggataacgatagtatccgcacccagcaccgggagatccttcgccgtttgcgcgacacctgcccgtgctttctcgcgcgccagacgcacaacatactgctgcgcgctctcctgcggctgacgctgctcctcaatgcccgtaacaatacgttcaaaggtcacgccaagttgcgcaagtaactcctgacgacgcggagaaccggaagctaaatacagagaagtcatagaaacctttattgcactgcaaactgctgacggactttgcgcatcagcaagaaaatccacggccagagcaccccattgactacactactccagaacacttccggtctgaaagagacgttaatcactaaaaactctgcccagaaaacaataatatccaccaccaggctaagcaacatgacgaccagcgcctgctgccataatgcgaggttgcggaaaagctggtatttcagcgccaccaggtaagcaatgatgctcatcgccaatacgcgtacgccaagcgtgctgccgctgatcagatccagtatggcacccatcacaaaacctgtgcccacatttacgcgatgaggcaaggccaggatccaatacaacaagatgagtaacacccagtttggccggaaaacaatcaggttatccggccagggcatgatttgcagcaacagcgcaatgaggaaagagagccagattacccagcgtccctggctacgatagctcgccactattgccctcccggcgcacgttattgccctcccggcgcacgcgcaggcggttgagcaccactttgcggcggcgtagccctttgtggagagcgattagcagcaggctgtgtcggcgcagcaggcgcagtagctgcatttcctgtcgccggttgctgcggagtcggctgagcgatccccgttgccggttcaggtaactttggccccatcgcgtctgggctaggcaatacctgcggcatcatctgcatcagacgttcattagcaacacgatgcacctcttccggcgtcatcgggttagcgccgttacgatctgccccccacagcagcagcagataacgcaaacgttgcagccctgcagtcggacgcgcctgaatcacagtataagcgcgctgggtatcgagttttacggaagagacaaccgcgaccggatagccttccgggaaacgaccgcccagaccggaagtcaccagcacatcaccaacacgaatatccgtattcgccggcagatgctcaagctgcaaatcatccgtacaaccgttaccggctgcaattacgcggatatcgttgcgcagcacctggattggcagcgcgtgggtcgcatcacaaatcagcagcacgcgactggtcagtttagcgacggccaccacctgaccaacaacacctttgtcgctgatgaccggctggccttcataaacgccattaacgctacctttatcgataacaacttgatcgctataaggatcgttaaccgtggagataacctgagtcaccattttctgctcatcctgacgcagcggggaacccagcagctcgcgcagacgcgcgttctcctgtttgtattgtccaagcatcagcagttcactgtttttcagcaacagttcctgacgtaacgcccggttttcaagttctaattggtcacggctggccagcgtctggcttacgccatccagcaattcacgaggagcattggaaacaaagtagaaaggactgacggcggtatccatataagtacggatttgactgaacgtccccaggcggctgtcggcaataataatgccgagcgccaccagcaccgccagaataaggcgaatctgtaggctcgggccacggctaaaaattggcttcataagttatgcgtattctcgtatcagaccaggcagggtaaacagacacttcccctgcctgcatccgattactcttcgctgaacaggtcgccgccgtgcatgtcgatcatttccagcgctttgccgccaccgcgcgccacacaggtcagcgggtcttcagcaacaacgactggaatgccggtttcttccattaacaaacggtcaaggttacgcagcagtgcgccaccaccggtgagcaccatgccgcgctcggagatgtcggaagccagttccggcgggcactgttccagtgcaaccattaccgcgctcacaataccggtcagcggttcctgcagtgcttcgaggatttcattggagttcagggtaaaaccgcgtggaacaccttctgccaggttacggccacgaacttcgatttcacggacttcatcgcccggataagcgctaccgatttcgtgcttgatacgttctgcggtggcttcaccgatcagagaaccgtaattacgacgcacatagttgatgatagcttcgtcgaaacggtcaccaccaatgcgcacagaagaggagtaaaccacaccgttcaaggagataacagcaacttcagtggtaccaccaccgatatcaaccaccatagaaccggtcgcttcagaaaccggcaggccagcaccaattgcggcagccatcggttcttcaatcaggaagacttcacgggcaccagcgccctgcgcggattcacgaattgcgcggcgttcaacctgggtcgcgccaaccggcacacaaaccagaacgcgcgggcttggacgcataaagctgttgctgtgcacttgtttgatgaagtgctggagcattttttcagtcacgaagaagtcggcgataacgccgtctttcattgggcgaatggcagcaatattgcccggcgtacggcccagcatctgcttcgcgtcatgacctactgcagctacgcttttcggactaccggcacgatcctgacgaatggccaccacggaaggctcattcaatacgatgccttgtccttttacataaatgagggtattcgcagtacccaggtcaatggacaagtcattggaaaacatgccacgaaattttttcaacatactaagggataatcctgaaagctggggcggaaaagaaaatccgcttactttaccaaccacacgcagcagcgacaaggcgcaaaaatcatctgctacggtgaaaattagtgcagttcgtttcctttgttacaaatctctgcctgagtccagaaaggcttaatgcatcagcagcattcctcgcctgtttgcaaccgcgtaaggtcattcatctgcatatgtgctgcaacaatctggcgagcagacaagcacactcccatgagacgcagcgcgcattattctacgtgaaaacggattaaacggcaggttaaacgctgtatctttgactatattttttcacgttagtatcaagtggctgactggacgcgaaaaaatccccttgcccgcctgtaacaccgcgctgaatcagggtctgccactcgcttcggctacgcacgccggtggcgtaaacctgggtgctggtcccggagcaggcttccaccaggctttgaaccagcagctggttctccgttcgcttctcaatgtttctgaccagccccggatggagcttgagtaactcaacattaagttctttgatccaactggtacttaccagcgtcaaaccagcctggttgacggctacccgtacccctaaagcattcactaaacgaataacaggttgtaaacgactgatatgttgacctacatcggcctctgcaagttcaataattatgcgttttcgttgacttttttcacattgcattaacgtatcgcgcagccaacgctgaaaacgcgggcgaatcaggctctcaacggtaacctgaatcgccagattttcctctggccagtaacgcaatagtggaataagacggctgatttgcagacggtcatactcttcgcttaagccaaactgcaagaccatcggcatatgctccgcgctgctaacctcttcattaccatcgaagatgcggcacatgagttcgcgatgatgaacctgaccttcgcgagtaaccgccggtttttgataaaggcgcgggccgccgcgactgagcatttgctcgataagcgtacgccagcgaacattaccgcgtcctttttcaggcaagctgtcatcgtaaatagcccagctattgccgccctgcaatcccgcattacgcgtggcagactctgcatgttccattacctgctcggtatcctgaccactacgccaggcgcagataccaatgtggatcatatcgtcgcgatcgagcattttattgttcggcaaggtatcaacggctttgattaactgaccggcgatgctctctgcctcttttaacgtccggtgcggtaacagcgcagcaaaatcactgcggtggtaacgcgccagcagtgcgccagggtagcgcatcataaatgtgctcagcagattcgtcagagtgaagaactgttcttcaacctggctgtgcccccaggtatcgctcaacatattgaaatccggcagacgaatcatcatcacgatcccgtgggtacctactttctcctgatcttccagtaacgttgctaactgattatcgaaaaagagtcggttattgaggccggttttcacgtcctgggcggcataagagcggatcagcgtatcaagacggctgtgttgttcgcgtgcgttctgaatttcacgaagcagcgtatccagcgcactgctggttctgggcggccattcatagatggttcccaacacattagagccacgctcaccgtttaagatacgagtagcccgggtttccagcaattcttgcccggcaagttgccgttgtaaccagcgtaccgccaggaagagcataacaatgataaagccaatcgcccccgtgagcggcgcggtggtcatcaagctatggaaatagttgcccatcggatcctgataaaccagacgcaagctcatccccggatgctttatcaacggaacgctcagttcgcgaaacagatcgctggagccaactggacgataactaccatttctggccagggtataaacctgtttatcaccatggagcaggtctacacgaacgatatctgcgctcatcattaattcggtaatttgtggccttaatacgctgaagtcattgctcacaaggtgggtatcaatcgccgtcgccaccgcctgaacgcgatgactaaacttatactgaatggcgttgtagaaacttaggctacagcccagcaaagtcacaaaaattgttaacccggtgagcagcgtaacaaaggcgctaaatttcgtcgttaatctcatccttgtgttaactccgatagtgaggaagcgggcatactagcaaatcagatttatctcgcaatttattgcgcttcatcggctttgcttttccattagcgagtatagtcttcagaaattattttccaatccatcatgcacatgaggaccacttatgcaggcgttacttttagaacagcaggacggcaaaactctcgcaagtgtacagactctggacgaaagtcgcctgccggagggcgatgtcacggtcgatgttcactggagcagcctgaactataaagatgcgctggcgattaccggtaagggaaaaatcatccgtaattttccgatgattcctgggatcgattttgccggaactgtacgcaccagcgaagatccgcgttttcatgccggtcaggaggtgttactcactggctggggcgttggtgaaaaccactggggtgggctggcggagcaggcgcgagtgaaaggtgactggctggttgccatgccgcaagggctggacgcgcgtaaagcaatgattatcggtactgccggttttaccgccatgctgtgtgtgatggcgctggaagatgccggtgttcgcccgcaggacggggagattgtcgtgacgggtgccagtggtggcgtcggcagtaccgccgtggcgctgctgcataagttgggttatcaggtcgttgccgtttccggtcgcgaaagtacccatgaatatctgaaaagtttaggtgctagccgtgttctccctcgtgatgagtttgccgaatcccgtcctctggaaaaacaagtctgggctggggcaattgacaccgttggcgacaaagtgctggcaaaagtgctggcgcaaatgaattacggcggctgcgtggcggcctgtggtctggcgggtggttttactctgccaaccacggtcatgccatttattctgcgtaatgtccgtttgcaaggggtggatagtgtaatgacgccaccagaacgccgcgcacaagcctggcagcgactggtcgccgatttaccggaaagtttctatacccaggcggcaaaagagatatctctgagtgaggcaccgaactttgccgaggccatcattaataaccagatccagggtcgcacgctggtgaaggttaactaaccatttagcagggaataataagagagggaactcattttgaaatcattattcaatcggttaacgggaaaagcggttagccggacagctttcgtcgaacaccttggtcaggaagttatacaacatcatccaaactggaaagtcatgatttcgactgaccacaaattgatgcgcattgatactccactaaacagctattattgatacgcctccgtcgcctgttaggtttatgttgctttgcctgggcgacgctacgcttagccccttacttatttctggtaccatggggtgaataatctgattttgtttgactacaaattaatcactcgaacctatttaatgctgagcattgtcaatcggttaattttgcgtgctttagcattcacatctatccagacgatgcagtgaaaattgggtaatccccagcaaccgctgcgtaatgtcgtctatcttgtcgcgatcctggcatccctacattatttgtggtctgtgaagattatctcattgcagcccctcatcttcgcagggctggcttttcagcttttcaccttacgttataagaagttccgtcgatgatggcgctaatttcgtgaattgtgcggcttgttgcaaattacacggtgttgaaggttatttacatgttagctgttgattatcttccctgataagaccagtatttagctgccaattgctacgaaatcgttataatgtgcgacctcgtcctccctgacgcagtttttgcgctgcggaaaaggtgacattggcgcaacgaaggtatattttgttttttgccggaggatagcagcagatcgctgcacaatgtccgtcaagtctaacattgacactctggggcaaaatagaccggcgtcccggcctgctggaatttatcgctatgcatacagctgtcggggcatacgctttacagacggcggtgaaacgcctgtcacaatcacactaaacaaagagtacggaacccactcatggatattcgtaagattaaaaaactgatcgagctggttgaagaaagtggcatctccgaactggaaatttctgaaggcgaagagagtgtacgcattagccgtgcagctcctgccgcaagtttccctgtgatgcaacaagcttacgctgcaccaatgatgcagcagccagctcaatctaacgcagccgctccggcgaccgttccttccatggaagcgccagcagcagcggaaatcagtggtcacatcgtacgttccccgatggttggtactttctaccgcaccccaagcccggacgcaaaagcgttcatcgaagtgggtcagaaagtcaacgtgggcgataccctgtgcatcgttgaagccatgaaaatgatgaaccagatcgaagcggacaaatccggtaccgtgaaagcaattctggtcgaaagtggacaaccggtagaatttgacgagccgctggtcgtcatcgagtaacgaggcgaacatgctggataaaattgttattgccaaccgcggcgagattgcattgcgtattcttcgtgcctgtaaagaactgggcatcaagactgtcgctgtgcactccagcgcggatcgcgatctaaaacacgtattactggcagatgaaacggtctgtattggccctgctccgagtgtaaaaagttatctgaacatcccggcaatcatcagcgccgctgaaatcaccggcgcagtagcaatccatccgggttacggcttcctctccgagaacgccaactttgccgagcaggttgaacgctccggctttatcttcattggcccgaaagcagaaaccattcgcctgatgggcgacaaagtatccgcaatcgcggcgatgaaaaaagcgggcgtcccttgcgtaccgggttctgacggcccgctgggcgacgatatggataaaaaccgtgccattgctaaacgcattggttatccggtgattatcaaagcctccggcggcggcggcggtcgcggtatgcgcgtagtgcgcggcgacgctgaactggcacaatccatctccatgacccgtgcggaagcgaaagctgctttcagcaacgatatggtttacatggagaaatacctggaaaatcctcgccacgtcgagattcaggtactggctgacggtcagggcaacgctatctatctggcggaacgtgactgctccatgcaacgccgccaccagaaagtggtcgaagaagcgccagcaccgggcattaccccggaactgcgtcgctacatcggcgaacgttgcgctaaagcgtgtgttgatatcggctatcgcggtgcaggtactttcgagttcctgttcgaaaacggcgagttctatttcatcgaaatgaacacccgtattcaggtagaacacccggttacagaaatgatcaccggcgttgacctgatcaaagaacagctgcgtatcgctgccggtcaaccgctgagcatcaagcaagaagaagttcacgttcgcggccatgcggtggaatgtcgtatcaacgccgaagatccgaacaccttcctgccaagtccgggcaaaatcacccgtttccacgcacctggcggttttggcgtacgttgggagtctcatatctacgcgggctacaccgtaccgccgtactatgacagtatgatcggtaagctgatttgctacggtgaaaaccgtgacgtggcgattgcccgcatgaagaatgcgctgcaggagctgatcatcgacggtatcaaaaccaacgttgatctgcagatccgcatcatgaatgacgagaacttccagcatggtggcactaacatccactatctggagaaaaaactcggtcttcaggaaaaataagactgctaaagcgtcaaaaggccggattttccggccttttttattactggggatcgacaacccccataaggtacaatccccgctttcttcacccatcagggacaaaaaatggacactcgttttgttcaggcccataaagaggcgcgctgggcgctggggctgacccttttgtatctggcagtttggttagtagccgcttacttatctggcgttgcccccggttttaccggctttccgcgctggtttgagatggcctgcatcctgacgccgctgctgtttattggactgtgctgggcgatggtgaaatttatctatcgcgatatcccactggaggatgacgatgcagcttgaagtaattctaccgctggtcgcctatctggtggtggtgttcggtatcagcgtttatgcgatgcgtaaacggagcaccggcaccttccttaatgagtatttcctcggcagccgctctatgggcggtattgtgctggcgatgacgctcaccgcgacctatatcagtgccagtagctttatcggcgggccaggagctgcttataaatacgggctgggctgggtattgctggcgatgattcagcttcctgcagtctggcttagtctcggtattctcggcaagaagtttgcgattcttgcgcgccgctacaatgcagtgacgctgaacgatatgctgtttgcccgctaccagagtcgtcttctggtgtggctggcgagtttgagtttgctggttgcgttcgttggtgcgatgaccgtgcagtttatcggcggtgcgcgcctgctggaaaccgcggcgggtattccttatgaaaccgggctgctgatttttggtatcagcattgcgttatataccgcctttggtggctttcgcgccagcgtgctgaacgacaccatgcaagggcttgtgatgctgattggcaccgttgtgctgcttattggcgtagtacatgccgctggcggcttaagtaacgcagtacagaccttgcaaaccatcgatccgcaactggttacgccacaaggcgctgacgatattctgagccctgcctttatgacgagcttctgggtactggtgtgttttggcgtgattggcctgccgcatactgcggtgcgctgtatctcttataaagacagcaaagccgtacatcgggggatcatcatcggtacgattgtggtcgcaattctgatgttcggtatgcacctggccggagcgttaggtcgggcggtgatccccgatctcaccgtaccggacctggtgatcccaacgttaatggtaaaagtgctgccaccgtttgctgccgggatcttcctggctgcaccgatggctgcgatcatgagcacaattaacgcccaactgctgcaaagttccgctacgatcattaaagatctctatctgaatatccgtccggatcaaatgcaaaacgagacgcgtctgaagcggatgagcgcggtaattacgttagttctcggcgcgttgctgctgcttgccgcctggaagccgccagaaatgatcatctggctgaatttgttggccttcggtgggctggaagccgttttcctgtggccgctggtgctgggtctttactgggaacgcgccaacgccaaaggcgcgctaagtgcgatgatcgttggcggcgtgctgtatgccgtactcgcgacgctgaatattcagtacctgggcttccaccctatcgtgcccagcttactactaagtttgctggctttcctggtcggaaaccgtttcggtacatccgtcccgcaagctaccgttttgactactgataaataaagagttttgccatgccttggatccaactgaaactgaacaccaccggcgcgaacgcggaagatcttagcgatgcgctgatggaagcgggtgccgtttctatcacttttcaggatacccacgatacgccagtatttgaaccgctgccgggcgaaacgcgcctgtggggcgacaccgatgtgattggtctgttcgacgctgaaaccgatatgaacgacgtggtggcgattctggaaaaccatccgctgctcggcgcaggcttcgcgcataaaatcgaacaactagaagataaagactgggagcgcgaatggatggataatttccacccgatgcgctttggtgaacgactgtggatctgccctagctggcgtgatgtgccggacgaaaacgccgtcaacgtgatgttagatccagggctggcgtttggtacgggtacccatccaaccacctctctgtgcctgcaatggctcgacagcctcgatttaaccggtaaaacagtcatcgactttggctgtggttccggcattctggcgatcgcggcgctgaaactgggtgcagcaaaagccattggtattgatatcgatccgcaggcgattcaggccagccgcgataacgccgaacgtaatggcgtttctgaccgtctggaactctacttaccgaaagatcagccagaagaaatgaaagccgacgtggtggtcgctaacatccttgcaggcccattacgtgaactggcaccgttaatcagcgtcctgccggttagtggcggtttgctgggcctttccggtattctggcaagccaggcagagagcgtttgtgaagcttatgccgatagcttcgcactggacccggtcgtggaaaaagaagagtggtgccgtattaccggtcgtaagaattaaccttcgcatcgccgtagggtgacgcggggcgaagtgcgagcaagctcacaaaaggcacgtaaatttgccgattatttacgcaaatttgcgtgccaaaattttcattcataaagaaaaattgagaacttactcaaatttctttgagtgtaaattttagtcactattttctaatatgatgatttttatgagtaattatcgcaccacgctcattttaaatgcaattctttgatccatctcagaggattggtcaaagtttggcctttcatctcgtgcaaaaaatgcgtaatatacgccgccttgcagtcacagtatggtcatttcttaactcatgcgcatcggacaatatcagctcagaaatcgcctgatcgcagcgcccatggctggcattacagacagaccttttcggacgttgtgctacgagatgggagccggattgacagtatccgagatgatgtcttctaacccacaggtttgggaaagcgacaaatctcgtttacggatggtgcacattgatgaacccggtattcgcaccgtgcaaattgctggtagcgatccgaaagaaatggcagatgcagcacgtattaacgtggaaagcggtgcccagattattgatatcaatatgggttgcccggctaaaaaagtgaatcgcaagctcgcaggtagtgccctcttgcagtacccggatgtcgttaaaagcatccttaccgaggtcgtcaatgcagtggacgttcctgttaccctgaagattcgcaccggctgggcaccggaacaccgtaactgcgaagagattgcccaactggctgaagactgtggcattcaggctctgaccattcatggccgtacacgcgcctgtttgttcaatggagaagctgagtacgacagtattcgggcagttaagcagaaagtttccattccggttatcgcgaatggcgacattactgacccgcttaaagccagagctgtgctcgactatacaggggcggatgccctgatgataggccgcgcagctcagggaagaccctggatctttcgggaaatccagcattatctggacactggggagttgctgcccccgctgcctttggcagaggttaagcgcttgctttgcgcgcacgttcgggaactgcatgacttttatggtccggcaaaagggtaccgaattgcacgtaaacacgtttcctggtatctccaggaacacgctccaaatgaccagtttcggcgcacattcaacgccattgaggatgccagcgaacagctggaggcgttggaggcatacttcgaaaattttgcgtaaacagaaataaagagctgacagaactatgttcgaacaacgcgtaaattctgacgtactgaccgtttctaccgttaactctcaggatcaggtaacccaaaaacccctgcgtgacagcgttaaacaggcactgaagaactattttgctcaactgaatggtcaggatgtgaatgacctctatgagctggtactggctgaagtagaacagcccctgttggacatggtgatgcaatacacccgtggtaaccagacccgtgctgcgctgatgatgggcatcaaccgtggtacgctgcgtaaaaaattgaaaaaatacggcatgaactaattcaggttagctaaatgcttgattaaaaaggcgctactcggcatggggaagcgccttttttataggtgtcacaaagggagtgaccatgagaacaggatgtgaaccgacccggtttggtaatgaagctaagaccattattcacggtgatgcgcttgccgaacttaaaaagatccccgccgaaagtgtcgatctgatctttgccgacccaccatataacatcggtaaaaattttgatggtctgatcgaagcctggaaagaagatctgtttatcgactggctgtttgaagtgattgcagagtgccaccgcgttctgaaaaagcagggcagcatgtacatcatgaacagtacggaaaacatgccctttatcgatctccagtgccgcaagctttttaccatcaaaagtcgcatcgtctggagttatgacagttctggagtgcaggcgaaaaaacactacggctccatgtacgaacccatcctgatgatggtgaaagacgcaaagaactacacattcaacggtgatgctattctggtagaagccaaaaccggaagccagcgcgcgttgatcgattatcgcaaaaatcctccacagccttacaatcatcaaaaagtaccgggtaacgtttgggattttccgcgcgtgcgttatttgatggatgaatatgaaaaccacccgacgcaaaaaccggaagccttactgaaacgcattattctcgcctcttccaacccaggcgatatcgttctcgacccgtttgctggtagctttactaccggtgccgtagccatcgccagcggacgaaaattcattggtattgagatcaacagcgagtacatcaaaatggggcttcgacggctggatgtcgcgagccattactctgcggaagaactggcgaaagtgaaaaaaagaaagaccggcaacctgagtaaacgaagccggttaagcgaagttgaccccgatctcattacaaagtaaaggatgtgtaagcctggttttcagattattcatttcgtgtatatttcctgccagacttggttaaacatgcacaggctcaggtaatgattcgcaagtattggtggctcgtcgttttcgctgtcttcgtttttctgtttgatactttactgatgcagtggattgaactgctggcaacagaaacagacaaatgccgcaatatgaacagtgttaatccactaaaactggttaactgtgacgaactgaattttcaggacagaatgtgaatttacatgacacttaattcattcgtttgatgaattaatttcgttatgttttcatctggcatgaacattcttaatacgttatcgaccagagcgggggcttgtttataaagatcataacccgccatattcattaaccagttttgaacaattccgctgaaggcaccatcaataataatcatcacaacatctaaatcgaggttatttgctacacaaccttgttgctgacacgcctgcaatacttcgcggagagtctgcggattaaagcccatcttttcgcgtatcactccctcggccagcatctcatcattaaattcacatttgtgatataagattttcagcaacgcctgctggcggggaattttggcaatatattgcaagccgacaatcaatttttcacgcaattgttgaaacgggtcatgctctaatccagccgtcaagtgttcctggattaactcccgcaaactaggctgttgcaaccacatctcattaaacagttgagtcttgttttcgaagtgccagtagatagcgccacgcgtaacgttagcggcgtcggcaatgtcgttgagcgtcgtcttgcttacgccatgctgcgcaaactgggcgatggcagtttcaatcagttcttgccgggtcttcagagcttcggctttggttctttttgccatgattaattattcaggaaataaatatattcgacacagagtgagaaaatagcgaaggttaatctatcacctaatgtgtatttatacgagaggctaatattgagttgctataaatcgttaaataaataatatatattatttacctaagatacattcactacatcaatatatatttcaatttacgaggttttaattctgcctctttcaacccgcgtcaaaataaaacagtagaatattaatctttttttgtgtttatgtgccttgagatgcctgtattcataactattccttacatcgacgaatgataatttgtaggatagcgaactgtatttttctttctgcgagttaacgcgttgcctttttgggtaaataacgcgcttttggttttttgaggaatagtaatgacgaaacatgccaggtttttcctcctgccctcctttattctgatctccgcggctttaatcgccggttgtaacgataagggagaagagaaagctcacgtcggtgaaccgcaggttaccgttcatattgtaaaaacggccccgttagaagttaagactgaattaccaggccgcaccaatgcttatcgtatagccgaagttcgcccacaggttagcgggatcgtactgaatcgcaatttcactgaaggcagcgatgtgcaagcaggccagtccctgtaccagatcgatcccgcgacctatcaggcaaattatgacagcgcgaaaggcgaactggcgaaaagtgaagccgccgccgccatcgcgcatttgacggtaaaacgttacgttccgctcgtgggtacgaaatacatcagccagcaggagtacgaccaggccattgctgatgctcgtcaggccgatgccgccgtgattgccgcaaaagccacagtcgaaagcgctcgcatcaatcttgcttataccaaagtcactgcgccaattagcggacgtatcggcaaaagcactgtgaccgaaggcgctcttgtcactaatgggcaaacgactgaactggcgactgtccagcagctcgatcctatctacgttgatgtgacccaatccagcaacgattttatgaggctgaagcaatccgtagagcaaggaaatttgcataaggaaaacgccaccagcaacgtagagttggtcatggaaaacggtcaaacctatcccctgaaaggtacgctgcaattctccgatgtgaccgttgatgaaagcaccggctccataaccctacgtgctgtcttccctaacccgcaacatacgcttttgccgggtatgtttgtgcgtgcacggattgatgaaggcgtccaacctgacgccattcttatcccgcaacaaggcgttagccgcacaccgcgtggtgatgcaaccgtgctgattgttaacgataaaagtcaggttgaagcgcgccctgtcgttgccagtcaggcgattggcgataaatggttgattagtgaaggactgaaatctggcgatcaagtcattgtcagcggcctgcaaaaagcgcgtccgggagagcaggttaaagccactaccgatacccccgcagatactgcaagcaagtaaggtaatctgacatggcaaacttttttattcgacgaccgatatttgcatgggtgctggccattattctgatgatggcgggcgcactggcgatcctacaattgcccgtcgctcagtatccaacaattgcaccgcctgcggtttctgttagtgcaaactatccgggcgctgatgcgcagaccgtgcaggatacggtgacgcaggttatcgaacagaatatgaacggtatcgataacctgatgtatatgtcctccaccagcgattccgccggtagcgtgacaattacccttaccttccagtccgggaccgatcctgatatcgcgcaagtgcaggtgcagaacaaactccagctcgccacgccgttgctgccgcaggaggttcagcagcaggggatcagtgttgaaaagtccagtagcagctatttgatggtggcgggctttgtctctgataacccaggcaccacacaggacgatatcagcgactatgtggcctctaacgttaaagatacgcttagccgtctgaatggcgtcggtgacgtacagcttttcggcgcacagtatgcgatgcgtatctggctggatgccgatctgctaaacaaatataaactgacaccggttgatgtgattaaccagttgaaggtacagaacgatcagatcgctgccggacagttgggcggaacgccagcgttaccagggcaacaattgaacgccagcattattgctcagacgcggtttaaaaatccggaagaattcggcaaagtgaccctgcgcgtaaacagtgacggcagcgtggtacgcctgaaagatgtcgcacgggttgaacttggcggtgaaaactataacgttatcgctcgtatcaacggaaaaccggcggcgggcctggggattaagctggcaaccggcgcgaatgctctcgataccgcgaaagccattaaggcaaaactggcggaattacagccattcttcccgcagggaatgaaggttctctacccttatgacaccacgccattcgtccagctttctattcacgaagtggtaaaaacgctgttcgaagccattatgctggtgttcctggtgatgtatctgttcttgcagaatatgcgagcaacgctgatccccgccattgcggtacccgtggtgttgttagggacgtttgccatcctcgccgcttttggttactccatcaacacactaacgatgttcgggatggtgcttgccatcgggctgctcgtcgatgatgcgatagtggtggtggagaacgtcgagcgcgtgatgatggaggataagctcccgccaaaagaagcgacggaaaaaagcatgagccaaattcagggcgcactggtgggtatcgcgatggtgctgagtgcggtatttattccgatggcattcttcggcggttctactggggcaatttatcgccagttctctatcaccatcgttagcgcaatggcgctttctgttctggtggcattgattcttacccctgcgttatgtgcaacgctgcttaaacccgtctctgctgagcatcacgaaaataagggcggtttcttcggttggtttaataccaccttcgatcatagcgttaaccactacaccaacagcgtcggcaaaatcctcggatccacaggacgatatttactgatctatgcgctgattgttgcaggaatggtggtgttgtttttacgtcttccgtcttccttcttacctgaagaggatcagggtgtctttctgaccatgattcagttacccgctggcgcgacgcaagagcggacgcaaaaagtgttggatcaagttacggattactatctgaagaacgagaaagcgaacgttgaaagtgtctttacggttaacggctttagcttcagcggccaggcacaaaacgccggtatggccttcgtcagtctgaaaccgtgggaagagcgtaatggtgacgaaaacagtgcggaagcggtaatccatcgtgccaaaatggaattgggcaagatccgcgacggttttgtcattccattcaatatgccagccattgttgaactgggcacggcaacgggtttcgactttgagttaattgatcaggctgggctgggtcacgatgccctaacccaggcccgtaaccagttgcttggtatggcggcgcaacatcctgccagcttagtcagcgtgcgccctaatggcctggaagacaccgcgcagtttaaactggaagttgaccaggaaaaggcgcaggcattaggtgttagtctttctgacatcaatcagaccattagtacggcgctgggtgggacttacgttaacgacttcatcgaccgtggccgcgtgaaaaagttgtatgttcaggcggatgccaaattccgtatgctgccagaagatgtcgataaactttatgtccgcagcgccaacggcgaaatggtgccattcagcgcctttaccactagtcattgggtgtatggctctccgcgactggaacgctacaacggtctgccgagtatggagattcagggggaagccgcgccaggaaccagttccggcgatgccatggcgttgatggaaaaccttgcgagtaaattacctgcgggcattggttatgactggacgggtatgagctatcaggaacgcttaagcggaaaccaggctcccgctctggtagcaatttcctttgtggttgttttcctgtgccttgctgcactctatgaaagctggagtattcctgtcagcgttatgttggtagtgccgttagggattgtcggcgtgctgctggcggcgacactctttaatcaaaaaaatgacgtctactttatggtgggcttgctaacgacaattggcttgagcgccaaaaacgctattttgatcgttgagttcgctaaagatctcatggagaaagagggtaaaggtgttgttgaagcgacactgatggcagtacgtatgcgtctgcgtcctatcctgatgacctctctcgcctttattctcggcgtattaccgctagctatcagtaacggtgccggcagtggcgcgcagaacgctgtgggtatcggggtaatgggaggaatggtctctgcaacgttgctggcaatcttcttcgtaccggtgttctttgtggtgatccgccgttgctttaaaggataaatcagaaacataaaggcgctttcgggtgcctttattatttccagtgaaacccataaaaattaataagatattcttctgctcactctttaaaagctttctatagttcccgctcccttcactatttttacaattcacataatttgtcattattcattccgcaagatttataacctccggtgataaaatggcattcagctcgttaataagagagttaacttattaagcgttagcgtttattactgaggtaacaccatgaaaagattaattcctgtggcattgctcaccgcattgctggcgggctgtgctcacgatagcccctgcgttccggtttatgacgatcagggtcgtctggttcacaccaatacctgtatgaaaggcacgactcaggataactgggaaacggctggggctattgccggcggggcagctgctgttgctggcctgacgatggggatcatcgctctaagcaaataactgaacagggcgcggagttccgcgctctttttaacgatacagtatctctccataagataaaatattgctatattctgctgggtaattccctgctgatttagcatgttacatcgcgttatttcgctgctttcgaaataacgcatcaatttaattttcacacttcccaccagaaatatactcacgctaacaatcattattctgcttagtaaaacacgcgtaaatattttgcgccaaaatgtggcgcatgtttcattttcgcaccattgcggggcgctgtttttattatttcctgtctacactcagcttattgcgacgcgaaatcgtgcgcaaaagctggcactacttttgcttataagaggatggccacagacaggtaaaagacgtttcccaaacgtcctataacgataattttcgcctcacaggaagcattatgaaaaagatgatgatagccacactggctgccgccagcgtgctgcttgccgttgcaaatcaggcgctgctggcgcgacgcttgatgccgttcagaaaaaaggttttgtgcaatgcgggatcagtgatggattacctgggttctcttatgccgatgctgacggtaagtttagtggtattgatgttgatatttgtcgtggtgttgccgctgctgtatttggtgacgacacgaaagtgaaatataccccgctcactgcaaaagaacgcttcaccgctttacagagtggggaggtggatttgctctcccgtaatacgacctggactagttctcgcgatgccgggatgggaatggcatttaccggcgtcacttattacgacggcattggcttcctgacgcacgataaagcggggctaaaaagcgcgaaagaactggatggcgctaccgtctgtattcaggcgggtactgataccgaactcaacgtcgccgactacttcaaggcaaacaatatgaagtacacaccggtgactttcgatcgctctgacgaaagtgcgaaggcactggaatctggtcgctgcgatacgctggccagcgatcaaagtcaactgtatgccctgcgcatcaaattaagcaacccagctgaatggattgtcttaccggaagttatcagtaaagaaccgcttggtccggtagttcgtcgtggcgatgatgaatggttcagcattgtacgctggacgcttttcgccatgctgaatgctgaagagatgggcatcaattcccagaacgtcgatgaaaaagcggctaatccagcaacgcctgatatggcacatctgctgggtaaagaaggcgattacggcaaggatctgaagctggataataaatgggcctataacatcatcaaacaggtgggtaactacagcgaaatttttgagcgtaacgtaggtagtgaaagcccgctgaaaattaaacgtgggcaaaataatctctggaataacggcggtattcagtacgcaccgcccgtgcgttaagtcggtgtgaggtaacgagcgtcgctacggcggcgctctcttcagcgttatgctttccgaggtttctatgtctcatcgccgcagtaccgttaaaggcagtctctcttttgccaaccctacggttcgcgcctggttattccagatccttgccgttgttgctgttgtcggcattgttggttggttatttcacaacactgtaacgaatctcaataatcgtggcattactagtggttttgcctttctggatcgcggcgctggcttcggtattgtccagcatttgatcgattaccagcagggcgacacctacggacgcgtttttattgtcggcttactcaatacgctactggtttctgcattgtgtattgtgttcgcttctgttttgggcttctttatcggtctggcgagacttagcgataactggctgctacgaaagctttccacaatttatattgagatcttccgtaatattcccccgctgctgcaaatcttcttctggtactttgccgtgttgcgcaatttgcccggaccacgccaggctgtgagcgcgtttgatctggcctttttgagcaatcgtgggctttatattccgagtccgcagctgggagacggatttattgcgtttatcctggctgttgttatggctatagtcctttctgttgggctattccgctttaataaaacataccagataaagaccggacaactgcgccgcacctggccgatcgccgcagtgttgatcattggtttgcctttactggcgcaatggctttttggcgcagcactacactgggatgtcccagccctacgaggctttaacttccgcggcgggatggttttaattcctgaactggcagccttaacgctggcacttagcgtttatacatctgcatttatcgccgagattatccgcgctgggatccaggcagtgccttatggtcaacatgaagcggctcggagtctgggattacccaacccggttacgctacgccaggtcattattccccaggcattgcgggtgattattccaccgttaaccagccagtatctcaacatcgtcaaaaactcctctcttgccgccgctattggctatcccgatatggttagcctgtttgccggcaccgtgctgaatcagacggggcaagccatcgagacgatagccatgaccatgagcgtctatctgattatcagcctgactatcagcctgctgatgaatatctataaccgccgcatcgcgatcgttgaacgctaaggagtcatgatgacaaaagtattgctgtctcatcccccgcgcccggcgagccataacagtagccgcgcgatggtgtgggtgcgaaaaaatctgttctccagctggagcaatagcctgctgactattggctgcatatggttgatgtgggaactgatcccaccgttgctgaactgggcatttttgcaggctaactgggttggcagtacgcgtgccgactgcacaaaagccggtgcctgttgggtcttcatccacgaacgatttggtcagtttatgtatgggctttacccacacgaccaacgctggcgaattaacctcgcattactgattgggcttgtgagcatcgcaccaatgttctggaaaatactcccgcatcgcggtcgctatattgcggcctgggcggtgatttacccactgattgtctggtggctgatgtatggcggtttttttgctcttgagcgggttgaaacccggcaatggggcgggctgacgctaactttaattattgcaagtgttgggattgcgggggcgctaccgtgggggatcttactggcgttaggtcgccgctcccatatgccgattgtgcgtatcttaagcgtcatttttatcgaattctggcgcggcgtgccgctgattaccgttctgtttatgtctagcgtcatgctgccgttgtttatggcagaaggcaccagtatcgacaaattgatccgcgcgctggttggcgtgatcctgtttcagagtgcatatgttgcggaagtcgtgcgaggtggattacaggcgctgcctaaagggcaatatgaagcggcagagagcctggcgttgggttactggaaaactcaggggctggttattctgccacaggcgttgaagctggtaattcctgggctggtaaataccatcatcgcactcttcaaagataccagcctggtgatcattatcgggttgttcgatcttttcagtagcgttcagcaggcaaccgttgatcccgcctggttgggtatgagcacggaagggtatgttttcgccgcgctgatctactggatcttctgtttcagcatgagccgctatagccagtatctggaaaaacgttttaacaccgggcgtacaccgcattgaggacactatgagccaaattttactgcaacctgctaacgcgatgattacgctggaaaacgtcaataaatggtatggacaattccatgttttgaaaaatataaatttaaccgtgcaaccgggagaacggatcgttctgtgtggccctagtggttccggtaaaagcacaaccattcgttgtattaatcatctggaagaacatcaacagggacggatcgtggtagatggcatcgaacttaatgaagatatccgcaatattgagcgcgtcaggcaggaagtgggaatggtctttcagcatttcaatctcttccctcatctgaccgttttacagaactgtaccctggcaccgatttgggtacgcaagatgcctaagaaagaggctgaagatctggcggtgcattacctagagcgggtgagaattgccgaacatgcgcataagtttcccggacagattagtggtggtcagcagcaacgcgttgccattgcgcgtagcctgtgtatgaagccgaaaattatgttgtttgatgagccaacgagcgcgctcgatcctgagatggtgaaagaggtgctggatacgatgattgggctggcgcagagcggtatgacaatgttgtgtgtaacacatgagatggggtttgcacgaaccgtcgctgaccgggtaatttttatggatcgtggggaaatagtggagcaagctgcacctgatgaattttttgcgcatcctaaaagtgagcgtacgagggcatttttaagccaggtaatccattaattgaatgttagttcgaaaagcaaaaaggccatcctttcggatggcctttcgcttgatttgatgtctggcagtttatggcgggcgtcctgcccgccaccctccgggccgttgcttcgcaacgttcaaatccgctcccggcggatttgtcctactcgggagagtgttcaccgacaaacaacagataaaacaaaaggcccagtcttccgactgagccttttgttttatttgatgtctggcagttccctactctcgcatggggagaccccacactaccatcggcgctacggcgtttcacttctgagttcggcatggggtcaggtgggaccaccgcgctactgccgccagacaaattcttttctaatctgccgaactttaacctaaaaagtggtgctgatacccagagtcgaactggggacctcacccttaccaagggtgcgctctaccaactgagccatatcagcacgctaaatttgatgcctggcagttccctactctcgcatggggagaccccacactaccatcggcgctacggcgtttcacttctgagttcggcatggggtcaggtgggaccaccgcgctacggccgccaggcaaattctgttttatcagaccgcttctgcgttctgatttaatctgtatcaggctgaaaatcttctctcatccgccaaaacagcttcggcgttgtaaggttaagcctcacggttcattagtaccggttagctcaacgcatcgctgcgcttacacacccggcctatcaacgtcgtcgtcttcaacgttccttcaggacccttaaagggtcagggagaactcatctcggggcaagtttcgtgcttagatgctttcagcacttatctcttccgcatttagctaccgggcagtgccattggcatgacaacccgaacaccagtgatgcgtccactccggtcctctcgtactaggagcagcccccctcagttctccagcgcccacggcagatagggaccgaactgtctcacgacgttctaaacccagctcgcgtaccactttaaatggcgaacagccatacccttgggacctacttcagccccaggatgtgatgagccgacatcgaggtgccaaacaccgccgtcgatatgaactcttgggcggtatcagcctgttatccccggagtaccttttatccgttgagcgatggcccttccattcagaaccaccggatcactatgacctgctttcgcacctgctcgcgccgtcacgctcgcagtcaagctggcttatgccattgcactaacctcctgatgtccgaccaggattagccaaccttcgtgctcctccgttactctttaggaggagaccgccccagtcaaactacccaccagacactgtccgcaacccggattacgggtcaacgttagaacatcaaacattaaagggtggtatttcaaggtcggctccatgcagactggcgtccacacttcaaagcctcccacctatcctacacatcaaggctcaatgttcagtgtcaagctatagtaaaggttcacggggtctttccgtcttgccgcgggtacactgcatcttcacagcgagttcaatttcactgagtctcgggtggagacagcctggccatcattacgccattcgtgcaggtcggaacttacccgacaaggaatttcgctaccttaggaccgttatagttacggccgccgtttaccggggcttcgatcaagagcttcgcttgcgctaaccccatcaattaaccttccggcaccgggcaggcgtcacaccgtatacgtccactttcgtgtttgcacagtgctgtgtttttaataaacagttgcagccagctggtatcttcgactgatttcagctccacgagcaagtcgcttcacctacatatcagcgtgccttctcccgaagttacggcaccattttgcctagttccttcacccgagttctctcaagcgccttggtattctctacctgaccacctgtgtcggtttggggtacgatttgatgttacctgatgcttagaggcttttcctggaagcagggcatttgttgcttcagcaccgtagtgcctcgtcatcacgcctcagccttgattttccggatttgcctggaaaaccagcctacacgcttaaaccgggacaaccgtcgcccggccaacatagccttctccgtccccccttcgcagtaacaccaagtacaggaatattaacctgtttcccatcgactacgcctttcggcctcgccttaggggtcgactcaccctgccccgattaacgttggacaggaacccttggtcttccggcgagcgggcttttcacccgctttatcgttacttatgtcagcattcgcacttctgatacctccagcatgcctcacagcacaccttcgcaggcttacagaacgctcccctacccaacaacgcataagcgtcgctgccgcagcttcggtgcatggtttagccccgttacatcttccgcgcaggccgactcgaccagtgagctattacgctttctttaaatgatggctgcttctaagccaacatcctggctgtctgggccttcccacatcgtttcccacttaaccatgactttgggaccttagctggcggtctgggttgtttccctcttcacgacggacgttagcacccgccgtgtgtctcccgtgataacattctccggtattcgcagtttgcatcgggttggtaagtcgggatgacccccttgccgaaacagtgctctacccccggagatgaattcacgaggcgctacctaaatagctttcggggagaaccagctatctcccggtttgattggcctttcacccccagccacaagtcatccgctaatttttcaacattagtcggttcggtcctccagttagtgttacccaaccttcaacctgcccatggctagatcaccgggtttcgggtctataccctgcaacttaacgcccagttaagactcggtttcccttcggctcccctattcggttaaccttgctacagaatataagtcgctgacccattatacaaaaggtacgcagtcacacgcctaagcgtgctcccactgcttgtacgtacacggtttcaggttctttttcactcccctcgccggggttcttttcgcctttccctcacggtactggttcactatcggtcagtcaggagtatttagccttggaggatggtccccccatattcagacaggataccacgtgtcccgccctactcatcgagctcacagcatgtgcatttttgtgtacggggctgtcaccctgtatcgcgcgcctttccagacgcttccactaacacacacactgattcaggctctgggctgctccccgttcgctcgccgctactgggggaatctcggttgatttcttttcctcggggtacttagatgtttcagttcccccggttcgcctcattaacctatggattcagttaatgatagtgtgtcgaaacacactgggtttccccattcggaaatcgccggttataacggttcatatcaccttaccgacgcttatcgcagattagcacgtccttcatcgcctctgactgccagggcatccaccgtgtacgcttagtcgcttaacctcacaacccgaagatgtttcacttcagagttgcgaaaatttgagagactcacgaacaactttcgttgttcagtgtttcaattttcagcttgatccagatttttaaagagcaaaacttcgcagtgaacctttgcaggtacactctgaagtattttttatttaatcactacagagatggtggagctatgcgggatcgaaccgcagacctcctgcgtgcaaagcaggcgctctcccagctgagctatagccccataacatgtagttaaaacctcttcaaatttgccgtgcaaatttggtaggcctgagtggacttgaaccaccgacctcacccttatcaggggtgcgctctaaccacctgagctacaagcctgtagaggttttactgctcattttcatcagacaatctgtgtgagcactgcaaagtacgcttctttaaggtaaggaggtgatccaaccgcaggttcccctacggttaccttgttacgacttcaccccagtcatgaatcacaaagtggtaagcgccctcccgaaggttaagctacctacttcttttgcaacccactcccatggtgtgacgggcggtgtgtacaaggcccgggaacgtattcaccgtggcattctgatccacgattactagcgattccgacttcatggagtcgagttgcagactccaatccggactacgacgcactttatgaggtccgcttgctctcgcgaggtcgcttctctttgtatgcgccattgtagcacgtgtgtagccctggtcgtaagggccatgatgacttgacgtcatccccaccttcctccagtttatcactggcagtctcctttgagttcccggccggaccgctggcaacaaaggataagggttgcgctcgttgcgggacttaacccaacatttcacaacacgagctgacgacagccatgcagcacctgtctcacggttcccgaaggcacattctcatctctgaaaacttccgtggatgtcaagaccaggtaaggttcttcgcgttgcatcgaattaaaccacatgctccaccgcttgtgcgggcccccgtcaattcatttgagttttaaccttgcggccgtactccccaggcggtcgacttaacgcgttagctccggaagccacgcctcaagggcacaacctccaagtcgacatcgtttacggcgtggactaccagggtatctaatcctgtttgctccccacgctttcgcacctgagcgtcagtcttcgtccagggggccgccttcgccaccggtattcctccagatctctacgcatttcaccgctacacctggaattctacccccctctacgagactcaagcttgccagtatcagatgcagttcccaggttgagcccggggatttcacatctgacttaacaaaccgcctgcgtgcgctttacgcccagtaattccgattaacgcttgcaccctccgtattaccgcggctgctggcacggagttagccggtgcttcttctgcgggtaacgtcaatgagcaaaggtattaactttactcccttcctccccgctgaaagtactttacaacccgaaggccttcttcatacacgcggcatggctgcatcaggcttgcgcccattgtgcaatattccccactgctgcctcccgtaggagtctggaccgtgtctcagttccagtgtggctggtcatcctctcagaccagctagggatcgtcgccttggtgagccgttaccccaccaacaagctaatcccatctgggcacatccgatgacaagaggcccgagggtccccctctttggtcttgcgacgttatgcggtattagctaccgtttccagtagttatccccctccatcaggcagtttcccagacattactcacccgtccgccactcgtcagcgaaacagcaagctgtttcctgttaccgttcgacttgcatgtgttaggcctgccgccagcgttcaatctgagccatgatcaaactcttcaatttaaaagtttgatgctcaaagaattaaacttcgtaatgaattacgtgttcactcttgagacttggtattcatttttcgtcttgcgacgttaagaatccgtatcttcgagtgcccacacagattgtctgataaattgttaaagagcagttgcgacgcggctttcagctcactgtcgcgaggtggcgtatattacgctttcctctttcagagtcaaccctgaatttcaggatttttttctcttcgttgttccgaccatcctgtgaagtgtttcacgttgtcgtctcaacggaggcgcattatagggatcccaattttttgcacaagtatttttttgatctttttttctgtttgttgttttttcaccctttttgctgcaatcgcacacaaaacggtgcttttttgcatactaaaagacttgcacaaggccaataatgcccccaaagtcattagtaaatcatttattgctgaggtaagtatgtctgatgttttacgcccataccgcgatctttttccacaaatcggtcagcgcgtaatgatcgacgatagcagtgtcgtgattggtgacgttcgtctggctgatgatgtggggatctggccgctcgttgtgattcgtggagatgtacattatgtacagatcggagcacgcaccaatatccaggatggcagtatgttgcatgtcactcataaatccagctacaacccagatggcaacccattaaccattggcgaagatgtcactgttggtcacaaggtgatgctccacggctgcaccattggcaatcgagttttggttgggatgggcagtattttacttgatggcgcaatagtagaagatgatgtgatgattggtgcgggtagtctggtcccacaaaataaacggctggagagcggatatctgtatctcggtagccccgtcaaacagatccgcccgttaagtgatgaagagaaggctgggttacgctattccgcgaataattacgtgaaatggaaggacgaatatctggatcagggtaaccagacccagccttgatcatcttcactttgttcctgaattaagttttccgcttcttcttccaggtcccagcgatgctgacgaaaactcgctaaccactgttctggcgtatctccagtaaagcgatacgccagactctcgccagagatcgcgcatgtcagttgcataccattcacgagagcgggaaaacatacacattttttattctcgtcccactcttccctgtccggaaactggatggcctgattcacgcggacaattcctcctgcaattgctttataactggttctacgtcaggcagaacaccgtgccagagaagaaaggcatgagccgcctgtgccaccagcattcctaaaccatcagcattacgcttactgcctcgctgctcacaccatgccagaaaaggagtttttcctttctgatagaacatgtcatagcaataaatgcctggatgaatgaggctactcgggatcgccggaatatcaccactgatgccactggatgttgcattaataatgagatcaaactcatgaccttccagttcgtccatactcaacgcctgaatactgccagtgtgcgcaaacaatttagccaactcttccgcgcgggataccgtccgattagttattgtcaccgcacagtccagggaaaggagtggcagtagtacgccgcgagatgctccaccagcgccgataagcagaatacgtaaaccagggcggataaaagacagacgttccagatcgcttaacaagcctacaccatcggtattgtcacccagcaggcgtccatcttctaaccgcatgagggtattaacagcaccagccaacgctgcccgttcagtaagctcatccgctctggcaaaagcctcttctttaaaaggcaccgtcacattcgcacctttaccaccagcactaaagaaagcgttcagtgtgttgatgaaatcattgatgggtgccaacacgcgcccatagggatgttcaatattcagttgctgagcaaattgctgatgaatgaatgggcttttgctgtgggctatcggattaccaaaaacagcataggtttccattatgttacccctgtcgaaacagttcacccgtcagggcatcgcggatttcactaggatttaaacgcccccccgtttcaccaggcacaaccgggaacgccgcgccaaattgtgcgcgaacttcgtctactgttcgacaaggtggcaatccactcaagttggcactggtagaaaccagcggtttaccataagcctggcacaaagcaaccaccaacggatggtcggtgactcgtacagcaaggctatcaaagcggcccgtcaaccagcgcggtgttgtcgcaggcgcgggaaagacaaaggtgacaggacctggccagcgggaaaaaatggtttcacgctgcacgtcagtcaacatggtgtcatcaatatagggtttaagctgctcgtaatttgctgcgattaaaatcagccccttatcaaccggacgctgttttaactccaacagtcgcatcactgctgtttcgctatcaggatcgcacccaacaccgaaaacggcttccgttggataggcgatgacacgttcttcattgagaacatctatcgcagctgcgatagcgtctctttgcaggttattattcacgttattattccgcgctaaccggctttccacattgtttactggcacaaaagtgttttacaccctgcgcggttttcttttcgatgagtagcggataatgacactcagggcattctccagctatgggtttgaagttaatggcaaattgacactccgggtagcgatcacaagagtgaaatgttttgccataacgggagcggcgctggaccagatggcccgtccgacattgggggcatgtaattgctgtttcgtccggtttatcgataagttcggtatgttcgcattcagggtagttaatgcaaccaataaacataccaaagcgtccctggcgtaataccagatttgcgccacatgcagggcaaacctgcccctccagaactttgacgatatgtccatccgcactagatttcagaggacggacgtagtcacacgccggatactgactgcatccaagaaacggaccgtgtttcccggatcgaataaccagttcagccccgcactttgggcaggactcattattacgcaccgtgaacagtgcacttttcgccataacaacttatgctgaattaaagaaatgattaatgcagcataccttcattcacttcaaagagtaattcttccatttgctggtacgcattttcgcagcccggaatattgaacaacaccatcaggatcacccatttcagatcatccagttcgaactctgcgttatccagcgcgagcactcgctctatcaccatttcacgagtttcaaggttgagcacctgaatctgctcaaggaaaagcagaaacccacggcagctggcatccagtcgttcacactcttccggtgtataaatacgcatggagagaggatcgctggccagttgcatcggttctgccaacccttcctgataatcagcaagtttttccagccatagcagggcattgtagatatcttctcgctcaaaacctgcgtcggtaagatcctgttcaagtttgtcttgatccacacgcaactcagcttctgtgtgaatataggtttcaaacaaatacattagtacgtcgaacatggcatgccctcctcaatcggacatagccgccgggtacagctgcgatccatcctgctaactccagttcgagtagttgagtaactacctctggcacaggttggccggcacgttcagcgacgacgtcaacaggtgttacctcatctcctacgttagccaggagctcaggaaatggcaatgccacgtcttgctgatctggactataaaaactattttcaggggcgtctggcaaccagtgcaatccaaattgcaagttttccagaatttcttccggttccgtcacaagaatcgcaccttgttttattaaccagtgaggcccttcgcttcccggattccctattggacctggcaaggcaaaaacttctcgcccctgctcaagcgcacaacgtgctgtcaccaggctaccactacgcaaagccgcttccaccaccagtacacctttacttagaccactgataatgcgatttcttcgtgggaaattgtaagcaaggggtggaacatcgaggggaaattcgctgacgagagcgcccccctgttcaagcagactggcagccagtcgggcatgacggcggggatgaatggtattaagtccattccccaatacagcaatgctgacgccatttacctgtaaggctgctttatgcgctacaccatcgattccacgcgccagtccactcgtaattgtcactccacgcgtcgccagagtttcgcaaaataatcgtccccatcgctcgccataccaactatgcgcccgactccccactacggcaagctgaaaactatgcagcgcgtgcagttctccttcaacaaacagtgcgccggggtaatctgtcgtcgccagaagttgaggaggataaaattcgctgtccgcaggaattaaatgatggttgggttgctccaaccaacaaagactgctttcgatactctttcgtggaaaactaagaaagcgttgtgcctgccgcaatgtaagccctgtttgctgcaatacaaccgcatcaatatggctctgttttgccacccagtgagcgatacggaccatatcatcgccgtacaagctgctgatactcattaaacgcagccaaatttctgtatcgaccatccttatctccctgccataagcagccttagcaatctttgcgattggtcagtgatgctgtcaatcagagggggatttgtctagaatagaagaaataatctttctaactcctgaacacatctctggagatttatgagcgttttgcaagtgttacatattccggacgagcggcttcgcaaagttgctaaaccggtagaagaagtgaatgcagaaattcagcgtatcgtcgatgatatgttcgagacgatgtacgcagaagaaggtattggcctggcggcaacccaggttgatatccatcaacgtatcattgttattgatgttagcgaaaaccgtgacgaacggctagtgttaatcaatccagagcttttagaaaaaagcggcgaaacaggcattgaagaaggttgcctgagcatccctgaacaacgtgctttagtgccgcgcgcagagaaagttaaaattcgcgcccttgaccgcgacggtaaaccatttgaactggaagcagacggtctgttagccatctgtattcagcatgagatggatcacctggtcggcaaactgtttatggattatctgagtccgctgaaacaacaacgtattcgtcagaaagttgaaaaactggatcgtctgaaagcccgggcttaaggataagaactaacgtgagtgaaagtctacgtattatttttgcgggtacacctgactttgcagcgcgtcatctcgacgcgctgttgtcttctggtcataacgtcgttggcgtgttcacccagccagaccgaccggcaggacgcggtaaaaaactgatgcccagcccggttaaagttctggctgaggaaaaaggtctgcccgtttttcaacctgtttccctgcgtccacaagaaaaccagcaactggtcgccgaactgcaggctgatgttatggtcgtcgtcgcctatggtttaattctgccgaaagcagtgctggagatgccgcgtcttggctgtatcaacgttcatggtagtctgctgccacgctggcgcggtgctgcaccaatccaacgcagtctatgggcgggtgatgcagaaactggtgtgaccattatgcaaatggatgtcggtttagacaccggtgatatgctctataagctctcctgcccgattactgcagaagataccagtggtacgctgtacgacaagctggcagagcttggcccacaagggcttatcaccacgttgaaacaactggcagacggcacggcgaaaccagaagttcaggacgaaactcttgtcacttacgccgagaagttgagtaaagaagaagcgcgtattgactggagtcttagcgcagcacagcttgaacgctgcattcgcgctttcaatccatggccaatgagctggctggaaattgaaggacagccggttaaagtctggaaagcaagcgtcattgatacggcaaccaacgctgcaccaggaacgatccttgaagccaacaaacaaggcattcaggttgcgactggtgatggcatcctgaacctgctcagcttacaacctgcgggtaagaaagcgatgagcgcgcaagacctcctgaactctcgtcgggaatggtttgttccgggcaaccgtctggtctgatagtccactcttctaagcccggtcttgccgggcgtttttatacttatgaaaaaacaacgtaatttacgtagcatggcggcccaggccgttgaacaagtcgtcgagcaagggcaaagtttaagcaacattctgccaccgctccagcaaaaagtttccgataaagacaaagcacttcttcaagagttgtgctttggcgtactgcgtacgcttagccagttagactggctgattaataagttaatggcccgtccgatgaccggcaaacagcggaccgtgcattacctgattatggttggtttgtatcaactgctttatacccgcattccacctcatgctgcgctggctgaaacggttgaaggcgctatcgcaattaagcgtccgcaacttaaagggttgataaacggtgtattacgccagttccagcgtcagcaagaagagttattagccgagtttaatgccagtgatgcacgttatctgcatccttcctggttgctgaagcgtctgcaaaaagcgtatccagagcagtggcaatccatcgtcgaagccaataaccagcgtccgccaatgtggctgcgtattaatcgtacgcatcattcccgcgacagctggcttgcattgctggatgaagcaggaatgaaaggtttcccgcatgcggattaccctgatgctgtacgtctggaaacacctgcacctgttcatgcgctacctggttttgaagacggatgggttaccgttcaggatgcaagtgcacaaggttgcatgacctggcttgcgccacaaaacggtgaacacattttggatctttgtgccgcccccggcggtaaaacaacgcatatccttgaggtggcaccagaagcgcaggttgttgcggttgatatcgacgaacagcgcctctctcgggtttacgacaatttaaaacgccttggtatgaaggcgaccgtgaaacaaggtgatggccgttacccttctcaatggtgtggcgagcaacagtttgatcgcattttattagatgcgccttgtagtgcaaccggtgtgattcgtcgccatccagatattaaatggttacgtcgcgatcgcgatatcccggaactcgcgcaattgcagtctgaaattctcgacgccatttggccgcatttaaaaaccggtggaactctggtctatgccacctgtagcgtgttaccggaagagaatagcctgcagattaaagcctttttgcaacgtaccgctgatgccgaactttgcgaaacaggaacaccagagcaaccgggtaaacaaaatctacctggtgccgaagagggcgacggcttcttttacgctaagctaatcaaaaagtgatgagataacgggtcgcgactgatgaaaattatcattctgggtgccggccaggttggcggcacactggcggaaaacctggttggcgagaacaacgatattactgttgtcgataccaacggtgagcgtctgcggaccttacaggataaatttgacctgcgggtcgtgcaggggcatggctctcatccacgcgtattgcgggaggcaggtgccgacgacgccgatatgctggttgctgtaaccagtagtgatgaaaccaatatggttgcctgccaggtagcctacagtcttttcaacacccctaatcgcatcgctcgtatccgcagtccagactacgtgcgcgatgccgataagctatttcatagtgatgctgtgccgattgatcatctgatcgcaccagagcagttggttatcgataatatttaccgactgattgagtatcccggcgcattgcaggtggtgaacttcgctgagggtaaagtcagcctggctgtggttaaagcctattatggcggcccgctgattggtaatgcacttagcaccatgcgcgaacatatgccacatatcgatactcgtgtggcagcaattttccgccacgatcgccccattcgtccgcaaggtagcaccattgttgaagctggtgatgaagtgttctttattgccgctagtcagcatatccgcgcggtgatgagtgaattacagcgactggaaaaaccgtataagcggatcatgctggttggtggcggtaatatcggtgcagggctggcgcgtcgtctggaaaaagattacagcgttaaactcatcgaacgtaatcagcagcgcgctgccgaactggcggaaaagttacagaatacgatcgtcttttttggtgatgcgagcgatcaagaactactggccgaagaacatatcgatcaagttgatctgtttattgccgtcaccaacgatgacgaggccaatatcatgtccgccatgcttgccaaacgtatgggtgcgaaaaaggtgatggtattgatccagcgtcgcgcttatgtggatctggttcaggggagcgttatcgatattgcgattagtccacaacaagcaactatttctgcgttgcttagccatgtgcgaaaagcagatattgttggtgtttccagtttgcgccgcggcgtagcagaagctattgaagccgttgctcacggtgatgaaagcaccagtcgcgttgtcggcagagtcattgacgaaatcaagctaccgccaggaacgattattggagcggtggtacgtggaaacgacgtgatgattgccaatgacaatctgcgcattgagcaaggcgatcacgtaattatgttcctcacagataaaaagtttattaccgacgtcgaaagactcttccagccaagccctttcttcttgtaattaataaggcgtctaatgacgccttattatttccctttgattatcaaggattaattaaattcattcctggcaggaaaatggcttaacatttgttagacttatggttgtcggcttcatagggagaataacatgagcattattaaagaatttcgcgaatttgcgatgcgcgggaacgtggtggatttggcggtgggtgtcattatcggtgcggcattcgggaagattgtctctagtctggttgccgatatcatcatgcctcctctgggcttattaattggcgggatcgattttaaacagtttgctgtcacgctacgcgatgcgcagggggatatccctgctgttgtgatgcattacggtgtcttcattcaaaacgtctttgattttctgattgtggcctttgccatctttatggcgattaagctaatcaacaaactgaatcggaaaaaagaagaaccagcagccgcacctgcaccaactaaagaagaagtattactgacagaaattcgtgatttgctgaaagagcagaataaccgctcttaacaagcgccactaagcagaagaccagtggtaaaaaagtgatttactttcttgccactggcctcccagttcccccgattgccatgttttccttttcgcatgtaactgcctttccccttcttatttttctctacgcgctgtcggaataagggatcatgtagtaatgcttctatcgcattatcctttatctgccctttagtatgctgatatcgactcataaaaactccagttggttatttaacggcgcgagtgtaatcctgccagtgcaaaaaatcaacaaccactcttaacgccactcgccccttgttcaagagcttcaagaatgctacaataaacactgctatgagcagtcccacaacaggcatcgttaaggcgttgcaaggaacgctgcatactctgcaactcggctatccgtgcttcgacttcctgcaatctttcctgcacaatgcctttactctcctgacaggtatggtgttcaggatcgatgcggatgctcagcaactcgcggatgctctccagactgaaacctagttgtctggcatggcggataaatttcaatcgctggagatcgctttcggtatataggcgaaacccaccttcagtacgcacttcatgctccatcatctgctgtttttcgtaataacgaatcgtgtcgggtgttacttccgccatttttgccagctcaccaatgcgatacatacatactccattagttatcgttgattttgtccaacaacttgtcagcataatcgccgcgtaaaaaatcggtactcaatccagcttgtcgcagcttcaattccagtaaactcaatcgacggctaacctcttgatattgcggatcatcgtgacggatacctttgagaatatccagaagctgaattgcttctctccgttgctcaagttctggcggtaagcaaccggcattcttcagcaagcgataccccgcacgtaattccggtggcacgtgagaatcatcatccagtatcaatggttcgccgctacctgccaggttatcaaactcacctttcgcttgcgcttctgctatatggcgctctgcccactggtcaagtaaccacataaatactccaggggatgaacaaaaagagtacagctattgtagataagtggggatactacgggtataaaaaaacccgccggggcgggtttttttacgttgcttcagattactctgcagcagcttctgctttctcactacgatcaaccagctcgatgtaagccatcggcgcgttgtcgcctgcacggaagccacacttcagaatacgagtgtaaccaccggcacggctcgcgaaacgcgggcccagttcgttaaacagttttgccacgatctcgttatcacgagtacgggtgaatgccagacgacgattagcaacgctatcagtcttggcaagagtaatcagcggctcaactacgcggcgcagctctttcgctttaggcagagtcgtcttgatgatttcatgacgaaccagactacctgccatattgcggaacatagcctggcgatggctgctgttgcggttcagttgacgaccactcttacgatggcgcatgaccttatccttctcagtaaaaccttaacctgtgattcggttactcgtcagcgatgcttgccggtggccagttttccaggcgcatgcccagagacagtccacgggaagccagcacgtctttaatctcagtaagagattttttaccaaggttaggcgttttaaggagctcaacctcggtacgctgtaccagatcaccgatatagtggatagcttctgctttaaggcagttagcagagcggacagtcaattccagatcgtcaacagggcgcagcaggatcggatcgaactctggtttctcttctttcacttcaggctgacgtacatcacgtaagtcaacgaaagcttccagttgttcagccagaatggttgccgcacgacgaatcgcctcttcaggatcgattgtgccgttggtttccatttcgatgaccagcttgtccaggtcggtacgctgttctacacgcgctgcttcaacattgtaggcaatacgctccacagggctgtagcatgcgtcgaccagcagacggccgattgggcgctcatcttcttcgctatgaattcgggtagaagccggcacataaccacgaccgcgctgaactttgatacgcatgctaatagacgcgttctcatcggtcaggtggcagatcacgtgctgcggcttgacgatttcgacatcaccgtcgtgggtgatatcggctgcagtcacagggccaatgccagatttattcaaggtaagaataacttcatctttgccctgaactctcaccgccagccctttcaggttgagcaggatttccaggatatcttcctgaacgccttctttggtgctgtactcatgtagtacaccatcaatctcaacctcggtcaccgcgcaacccggcatgctactgagcagaatacggcgcagtgcgttacccagagtatggccaaagccacgctctaaaggctcaagggtcaccttggcgtgcgtgctactcacttgctcgatatcaaccaggcgcggttttagaaactctgtcacagaaccctgcattgtgtcctctctttggtactaagctttacttggagtaaagctcgacgatcaggtgttcgttaatgtccgcagacagatcagaacgctccggcttacgcttaaacgtaccttccatcttgccagcatcaacttccagccaggttggcttttcacgctgctcagccagctccagagcggctttcacgcgagactgcttcttcgctttctcacgaatgcttacaacgtcattcggactaacctgataagaagcgatgttaacaacacgaccgtttaccataattgctttatggctaaccagctgacgtgcttctgcacgagtggcaccgaagcccatacggtatacaacgttgtccagacgaccttccagcagagccaacaggttttcaccggtgttgcctttcagacgtgctgcttctttgtagtagttacggaactgacgctccagcacaccatagatacggcgaactttttgcttttcacgcaactgcacaccatagtcagacagacgcggtttacgcgcaccgtgctggccaggagcttgttcaattttacacttggtatcgatcgcgcgaacgccagacttaaggaataagtcggtgccctcacgacggctcagcttgagcttaggacccaaatatcttgccattttctttctccaacaaacctggaaaacgaggcgttatacgcgacgttttttcggcggacgacaaccgttatgagggatcggagtcacatcagtaatgttagtgatgcggaaacctgcggcgttcagagcacgaatagtagattcgcggcctggacccggacctttaaccataacttccagattcttgatgccgtattctttcacggcgtcagcgcaacgctctgctgcaacctgagctgcaaacggagtggatttgcgagaaccacggaaaccggaaccaccggctgttgcccaacccaacgcgttaccctgacgatcagtgatagtcacgatggtgttgttgaaagaagcatggatatgagccacgccgtcagagacttgttttcttacacgtttacgtgcacgaattggtgcctttgccattattcaatcaccccgattatttcttgatcggtttgcgcggacccttacgggtacgtgcgttggtcttggtacgctgaccgcgaaccgggagaccacgacgatgacgcaaaccgcgatagcaaccaagatccatcaggcgcttgatgctcatgctgatttcacggcgcagatcaccttcaacgacaaatttggcaacttcgtcacgcagcgtgtcgatttgtccttcagacagctcactgatcttaacatcttcagcgatacccgctgcagccaggatggctttagaacgggtcttgccgacgccataaatgctagttaatgcgattacggcatgcttatgatcaggaatgttaatgcctgctatacgggccactatgcactcctactatttaatatgtacgttccatgctgaaaagcccgttttcaggatactcaaatggaaacgcacagacatacaaaagattggctggctaatctagccagctcaacccaactttgcaagaaaaatatgcgaaaaaatcagccttggcgctgtttatgcttcggctcggcactgcaaatcacacggatgacaccatcacgcttaacgattttgcagttacggcataatttcttgacggaagcacgaactttcatttttactctccgtaacttctcgggcgaccaattatcggccgtagcctttcaggttcgccttcttcaatgcagactcatactgactggacatcatcagagtttgcacttgagccataaagtccataatcacgacaacaacgataagcagactggtcccaccgaagtagaacggtactttcattgcatcacgcatgaactccgggatcaggcagataaaggtaatatacagcgcaccaaccagggtcaggcgggtcattactttatcgatatacttcgccgtttgctctcccggacgaattcctggtacaaatgcaccggacttcttcaggttatctgctgtttcacgcgggttgaaaaccaacgccgtgtagaagaaacagaagaagatgattgcagacgcatagagtaacacataaagcggttgcccaggctgcaaatacaggctaattgttgtcagccagttccaaccagtaccgcccccgaaccaactcgcgatggtcgccgggaacagaataatactggaagcgaagattgccgggattacccccgccatattcactttcagcggtaaatgtgtgctctgtgcagcatagacacgacgaccttgctgacgtttcgcgtagtttaccacaatgcggcgttgaccacgctcaacaaatacaacaaagaacgtcactgcaaatactaatactgcaaccaacagcaacacgaggaagtgcaggtcgccttgacgcgcttgctcgatagtatgggcaatggctggcgggagtcccgcgacaataccggcgaagataatgatactaataccgttgccgatacctcgttcagtaatctgttcgcccaaccacatcaggaacatggttcctgtgaccagacttacaacagcggtgaagtagaatgcaaagcccgggttaatcaccaggccttgcataccaggcatattcggcagaccggtagcaataccgatgctctggaatattgccagcaccagagtaccgtagcgggtgtactggctgatcttacgacgaccagactccccttctttcttaatttctgccaacgttgggtgaaccaccgtcagcagctggataatgatgctcgcgctaatatacggcatgatccccagagcaaagatagaagcacggctgagagcaccaccagagaacatgttaaacatctcaatgatggtgcctcgctgttgctcaagcagtttggcaagtacagcggcatcaataccagggatcggaataaaagagccaatacggaacacaatcagcgcaccgataacaaacagcagtctgcgtttcagctcgcctaagccacctttggcactttgaaaatctaatcccggttgtttagccatctgctacttattcctcgattttaccgccagcagcttcgatagcagcacgagcgcctttagtaacacgcaggccacgaacagttaccggagtcgttacttcgccagccaggatcactttcgcgaactcgatctggataccgataatgttagccgctttcagcgtgttcaggtctactacaccgccttctactttagccaggtcagacagacgaatttcggctgtaatcgctgctttacgagaagtgaagccgaatttcggcagacgacggtacagaggcatctgaccaccctcgaaaccgcgacgtacgccaccgccagaacgagacttctgacctttgtgaccacgaccaccggttttaccgaggccagaaccgataccacgacccaggcgtttacccgcctttttggagccttcggccggagacagagtatttaaacgcatctcttactcctcaactttaaccatgaaggaaaccgcgttgatcataccgcgaatagcaggagtatcctcgcgctctacggtgtgaccaatacgacgcagacccaggccaagcagcgttgccttgtgtttcggcagacgaccgattgcactgcgggtttgagtaattttaatagtctttgccatggtttatttccccagaatttcttcaacggatttaccacgcttggcagcgaccatttctggagaattcatattttccaggccatcaatagttgcacgaaccacgttgatcgggttggtggaaccataggctttagccagaacgttatgaaccccagcgacttccagaacggcgcgcattgcaccaccggcgatgataccggtaccttcggaagccggctgcatgaatacgcgagaacccgtgtgaacacctttaacagggtgttgcagagtgccgttattcagcgcgacgttaatcatattgcgacgggctttttccatcgctttctggatcgctgctggaacttcacgcgctttaccgtaaccaaaaccaacgcgaccgttaccatcgccaactacagtcagagctgtgaaggagaaaatacgaccacctttaacggttttagatacgcggtttaccgcgatcagcttttcctgcagttcgccagcttgtttttcgatgtgagccatcttacacctctaccttagaactgaaggccagcttcacgggcagcatctgccagtgcctggacacgaccatgatattggaacccggaacggtcaaaggatacatctttgatgcctttttccagagcgcgttcagcgacagctttacccacagctgcagccgcgtctttgttaccggtgtacttcagttgttcagcgatagctttttctacagtagaagcagctaccagaacttcagaaccgttcggtgcaattacctgtgcgtaaatgtgacgcggggtacgatgtaccaccaggcgagttgcgcccagctcctggagcttgcggcgtgcgcgggtcgcacgacggatacgagcagatttcttatccatagtgttaccttacttcttcttagcctctttggtacgcacgacttcgtcggcgtaacgaacacccttgcctttataaggctcaggacgacggtaggcgcgcagatccgctgcaacctggccgatcacctgcttatcagcgcctttcagcacgatttcagtctgagtcggacattcagcagtgatacccgcaggcagctgatggtcaacaggatgagagaaacccagagacaggttaatcacattgcctttaaccgctgcacggtaacctacaccaaccagctgcagcttcttagtgaagccttcggtaacaccgataaccatactgttcagcagggcacgcgcggtaccagcctgtgcccaaccgtctgcgtaaccatcacgcggaccgaaggtcagggtattatctgcatgtttaacttcaacagcatcgttgagagtacgagtcagctcgccgtttttacctttgatcgtaataacctgaccgttgatttttacgtcaacgccggcaggaacaacgaccggtgctttagcaacacgagacattttttcctccgattaggctacgtagcagataatttcgccaccaagaccagcctggcgcgctgcacgatcagtcataacacctttagaggtagaaacaactgcgatacccagacccgccataactttcggcagctcatctttacgtttatagatgcgcagacctgggcggctgacacgctgaatgctttctacaacagctttgccctggaaatacttcagagtaagttccagttcaggcttggtgtcgccttcaactttaaaatcttcaataaaaccttcttccttcagcacgttggcgattgccactttcagcttggaggaaggcatggtgaccgcagctttgttcgcggcctgaccgttacggatacgggtcagcatatccgcgatcggatcttgcatgctcatctgtctttactcccgtgattcaattggtgacaattaccagctagcctttttcagacccgggatttcaccgcgcatagcggcttcacggaccttaatacggctcaacccgaacttccgcaggaaaccatgcggacgacctgtttgacggcagcggttacgctgacgagacgggctggaatcacgcggcagagtctgcagcttgagaacagcgttccaacgatcttcgtcggaagcgttcacatcagagatgatcgctttcagttcagcgcgtttcgcgaagtatttatcagctaaagctacgcgttttacttcgcgtgctttcatactttgcttagccatttagtaaccctaccttacttgcggaacgggaagtcaaaggcagccagcagagcgcggccttcttcgtcagatttcgcagtagtggtaatggtaatatccaaaccacgaacgcggtcgactttatcgtagtcgatttctgggaagatgatctgctcacggacacccatgctgtagttaccacgaccgtcgaaagacttagcggacaggccacggaagtcacggatacgaggtacagcaatagtgatcaggcgctcaaagaactcccacatgcgttcgccacgcagagttactttacagccgatcggatagccctgacggattttgaagcctgcaacagatttgcgtgctttggtgatcagcggtttttgaccggagattgctgccaggtctgctgctgcgttatccagcagttttttgtcagcgatcgcttcaccaacacccatgttcagggtgatcttctcgacccgagggacttgcatgacagaattgtagttaaactcagtcatgagttttttaactacttcgtctttgtagtaatcatgcagtttcgccatcgtactactccaaattacttgatagtttcgctgttagacttgaagaaacggacttttttaccgtcttcgaatctaaagcctacacggtcagccttgccggttgccgcattgaagattgctacgttggaaacctgaatagcggcttctttttcaacgatgccacccggttggttcagggccggaaccggcttctgatgtttcttaaccaggttgataccttcaacaatgaccttgccggaagacaggacattcttaactttaccgcgtttacctttatctttaccggttaacacgataacttcgtcatcacgacggattttcgctgccatgattcgctccttagagtacttctggtgccagagagataattttcatgaacttctcactacgaagctcacgagttaccggcccaaaaatacgcgtaccgataggctgctcgctgttgttgttcagaagaacacaagcattaccatcgaagcgaatgacagaaccgtccgggcgacgaacacccttcttggtgcgcaccactaccgccttcagcacatcaccttttttgaccttaccacgcggaattgcttctttgatggtgatcttgatgatgtcgcctacgcctgcgtagcgacggtggctgccacccagaaccttgatacacattacgcgacgtgcaccggagttgtcggcgacgttcagcatagtctgttcttggatcattttagtgctccgctaatgtcaactactactgagacccgaaaatcaggtcgttaaaaatccccatatcgagggcgcggcattataacaccgcttcaaggatatgggtagaaaaaataaacggctcatttctgagccgtttattcgtattgagagagtgtactgtattacagaaccgctttctctacaacgcgaaccagcgtccaggatttagtcttggacagcggacggcattcgcggatttcaaccacgtcaccgataccgcattcgttgttctcgtcatgtacgtgcagtttggtcgtacgcttgatgaatttaccgtagatcgggtgtttcacaaaacgttcgatagcaacaacaatggatttctccattttgtcgctaacaacgcgaccttgcagagtacggattttatcggtcattacgcacccgccttctcgttcagtaaagtcttaacgcgtgcgacatcgcgacgcacttgcttcaacaggtgagactgttgcagctggccacttgcagcctgcatacgcaggttgaactgctcacgcagcaggttcagcagctcggtgttcagctcttcaacgctcttctcacgcagctcttttgctttcattacatcaccgtcttagttacaaaggtggttttaatcggcagtttcgctgctgccagcttgaatgcttcacgggccagctcttccggaacaccgtccatttcatacaggactttacccggctgaatcaaggcaacccaatactccacgttacctttacctttacccatacgcactgccagcggcttttcagtgatcggtttgtccgggaacacacggatccagatcttaccttgacgcttaactgcacgggtcatagcacgacgtgctgcttcgatctgacgggcagtcagacgaccacggccaacagctttcagaccgaagctgccgaagctaacatccgtaccctgcgccagaccgcggttacggcctttgtgcattttacggaattttgtacgctttggttgtaacatcagcgacgctccttatttacggcctttacgctgctgctttttaggctgagcagccggtttttccggttgttcaacagcagccataccacccaggatctcgcctttgaagatccacactttaacgccgattacaccgtaagtggtgtgcgcttcagaggtgttgtagtcgatgtcagcacgcagagtgtgcagcggtacgcgaccttcgcggtaccattcggtacgtgcgatttccgcgccgcccagacggccgctaacttcaactttaatacctttagcgcccagacgcattgcgttctgtacagcacgcttcatagcacgacggaacataacgcgacgttccagctgagaagtgatgctgtcagcaaccagttttgcgtccagttcaggcttacgaacttcggcgatgttgatctgtgcaggaacgccagcgatgtccgctacgaccttacgcagtttttctacgtcttcaccttttttaccgataacgatacccgggcgagcagtgtgaatggttacacggatgctcttagccggacgctcgataacgatacgagatacggacgctttagccagttccttagtcaggtactgacgtactttaaaatcgctgtccaggttgtcagcgaattctttggtgttcgcaaaccaggtagagttccatggttttacaatacccaggcgaataccattaggatgtactttctgacccattgctagtctccagagtctcagcgatcggacacaaccacagtgatgtggctggtgcgcttcaggatgcgatctgcacgaccttttgcacgcggcataatgcgcttcatgctcgggccttcgtctacgaaaattttcgtaactttcagatcgtcaatgtcagcgccatcgttgtgttcagcgttagcaatggcagattccagaactttcttgaccagtacagccgctttcttgttggtgtaggtcaaaatatccagagcctggctcactttcttaccgcgaatcaggtcagcaacaaggcgaaccttctgagcagaagaacgagcatggcgatgtttagcgatagtttccatctcttcctcctaccttatttcttcttcgcttttttatcagcagcgtggccgcgataagtacgagtcggtgcgaattcacccagtttgtgaccaaccatttcgtcggttacaaataccggaacgtgctgacgaccattatggacagcgatggtcaaaccgatcatgttaggaaagatcgtactacgacgggaccaagtgcgcaggggcttcttgtctccgctttccaccgctttctctaccttcttcagcaagtgcaggtcaataaaaggacctttcttgagagaacgtggcatggcttatcctctaaaattatttgctacggcgacgtacgatgaatttatcagtacgcttgttgctgcgggtcttcttacctttggtctgaacgccccacggagttaccgggtgcttaccaaagttacgaccttcaccaccaccatgtgggtggtctaccgggttcatcgcggtaccgcgaacggtcggacgaacaccacgccagcgtgcagcacctgctttacccagaacgcgcagcatatgctcagcattgccaacttcgcccagagttgcacggcagtctgcttctactttacgcatttcaccagaacgcagacgcagggtgacataagcaccatcacgagcaacgatctgaacgtaagtaccagcggaacgtgccagctgaccgcctttacctggtttcatttctacgttatgaacagtagaaccaaccgggatgttgcgcatcggcagggtgttacctggtttgattgcagcatcaacgccagactgaatctggtcgccagctttcaggcctttaggggccaggatgtaacggcgttcaccgtctttgtacagaaccagcgcgatgttcgcggaacggttcggatcgtactcaagacgttcaacaactgccgggataccgtctttgttgcgtttgaagtcaacaatacggtaagcctgcttgtggccaccaccgatatgacgagtggtgatacggccattgttgttacgaccaccggatttgctgtttttttccagcaacggagcaaaaggtttgcccttgtgcagctcagggttaaccactttaactacgtggcgacgacccggagatgtcggtttacatttaacaactgccattgtattactcctccgacttactcagcgccgccaacgaagtccagattctggccttctttcagggtgacgtaagcttttttccagtcgctacgacgaccgatacgctgtccgtgacgtttaactttccctttaactaccagggtgttaacgacttcgacttcgacttcaaacagtttctgcacagcagctttgatttctgctttggtcgcgtctttagcaactttgagtacgatggtgttggatttttccatcgcagtagacgctttttcagaaacgtgcggtgcacgcagcaccttcagcagacgttcttcacgaatcatgccagcatctcctcaacttgcttaacagcatcagcagtcattacgactttgtcgaaggcgatcaggctaaccgggtcgataccagttgcatcgcgtacgtcaaccttgtgcaggttgcgcgcagccaggaacaggttttcgtccagctcaccggtgatgatcagcacatcttccagagccatgtctttcagtttctgtgccagcagcttagttttcggcgcttctacagagaacttctcgacaacgatcagacgatcctgacgtaccagttcggacaggatgcttttcagcgcgccgcggtacatcttcttgttaactttttgactgtggtcctgcggacgagcagcaaaggtcacgccaccagaacgccagatcgggctcttgatagaaccagaacgcgcacggccggtgcctttctggcgccacggttttttaccggaaccagttacttcagcacgagtcttctgagcacgagtaccctgacgagcaccagctgcataagcaacaacaacctggtgaaccagcgcttcgttgaaatcacgaccgaaggtagtttcggaaacagtcagcgcgctctgcgcgtctttcaatactaattccattgctatctccttacgccttcacagctggtttaacgatcaggtcgctaccggttgcacccgggacagcacctttaaccagcagcaggttgcgctcagcgtcaacgcgtactacgtcaaggctctgaacggttacacgttcgttacccatctgacctgccattttcttgcctttgaacactttgcccggagtctggttctgaccgatagaacccggaacgcggtgagacaaggagttaccgtgagtagcgtcctgggtacggaagttccagcgcttaacggtacctgcgaaacctttacctttagaggtgccagttacgtcaacttttttaacgtcagcaaacagttcaacgctaatgctctgacctacagtgaactcttcgccttcagccaggcggaattcccacagaccacggccagcttctacgccagctttagcgaagtggccagcttcaggcttggtcacacggttagcttttttagcaccggtggtcacctgaatagcacggtagccatcgttagccaggtctttaacctgagtaacgcggtttgcttcaacttcgattacggttactgggatagaaacgccgtcttctgtgaagatacgggtcatacccacttttttaccgactaaaccaatcattgtttcaacctctcaatcgctcaatgacctgattaacccaggctgatctgcacgtctacaccggcagccagatccagacgcatcagagcatcaacggttttctcggttggctcaacgatgtcaaccagacgcaagtgagtacggatttcgtactgatcgcgcgcgtctttgttgacgtgcggggagatcagaacagtgaagcgctctttgcgtgtcggcagcgggatcggaccacggacctgcgcaccagtgcgcttggcagtctcgacgatttccgcggttgcttgatcgatcagacgatgatcaaacgctttcaggcggatacggattctttggttctgcatgagaccagagctccaattattttataaacgaaaatgattactcctcagacccattacgattgatgggagagtgtaaccgttcttacgtagctccccgattgggagcattgttaggtagccaaattcggctaactgaggttcagattgaacctgctgtcaactacgacaagcccgcgcattatacatacttaaccaccgaacgcaagcgtattgctagtaaagtaaacagccttcgggttatctctcaagttcgttcagtgcatttttgacacgctctcttaaaccggctttctcttcgctttcttccacagtattttcttcgtcttcagaagaagagggggcattctcaaccgcgacgcctgggtcatcttcctcctcgacggattcgacgacggggagtggctgttttttgaagaaatagtgttgtgtactttgtttaaaagcgggcgtttcagcctctacagtgacttcggcttttactatccaaagcacccatagctgcctggcatacccaccaaccagcaccattcctgcaaaccacaggcaaatcagtaataaacaaattacatatattatggtgctgtgtttttgtcgggagaagataccagggtgacctgtttctttctgctcacgcgcggcgatatagaattcaaacattataatcccttgtgacgtaaaaactgcaaaacaaaagtcctacgcaggaattatttacgttttacgagaacccttcaatatgaattaaattacggcattaaaaataagaaaaaagcctgacaaatgaagcattttaaaaacagaaacattcatatttaaaatgttaaattgaattgatattttaaatatgaataatttattcgttctgacagtacgaataagatatgccgtcaacaaatgcaaaaagggcgccgaagcgcccttttcaattcaaaactaattaacgtgtaattagcccagaactttagcaacaacgcccgcgccaacggtacggccgccttcacggattgcgaaacgcagaccgtcgtccatcgcgatcgggtggatcagggtaacaaccattttgatgttgtcgcccggcattaccatctctacgccttccggcagttcgatggtaccagtcacgtcagtagtacggaagtagaactgcggacggtagcctttgaagaacggagtatgacggccgccttcatctttggacagaatgtacacttcagattcgaacttggtgtgcggcttgatggtgcccggcttagccagtacctgaccacgttcgatttcttcacgtttgataccacgcagcagaacacctacgttctcaccagcacggccttcgtccagcagtttgcggaacatttcaacgccagtacaggtagacttctgagtctctttgataccaacgatttcaacttcttcaccaactttgatgataccgcgttctacacgaccggtaacaacggtaccacgaccggagatggagaatacgtcttcgatcggcagcaggaacggcttgtcaatcgcacgctctggttccggaatataagaatccaggaagccagccagttccaggattttcgcttcccactctgcgtcgccttccagcgctttcagagcagaaccacgaacgatcggagtgtcgtcgcccgggaagtcgtactgagacagaagttcacgaacttccatttcaaccagttccagcagctcttcgtcatcaaccatgtcgcatttgttcaggaacacgatgatgtacggaacgcctacctgacgacccagcaggatgtgctcacgagtctgcggcatcgggccgtcagtcgcagcaactaccaggatcgcgccgtccatctgagcagcaccggtgatcatgtttttaacatagtcggcgtgccccgggcagtctacgtgtgcgtagtgacgggtcggggtgtcgtattcaacgtgagaagtgttgatggtgataccacgagctttttcttccggcgcgttatcgatctggtcgaatgcacgagcagcaccgccgtaggttttagccagtacggtggtgattgcagcggtcagagtagttttaccgtggtcaacgtggccgatagtaccaacgttaacgtgcggttttgtacgttcaaatttttctttagacacggctatattccttactatagtgctctccccttcaggagagagcacgggactttggtattaacccttaggcttatttaccacgggcttcaattacggcctgagcaacgttactcggcgcttcatcatacttcaggaattccatagtgtaacttgcacgacctttggtcagagaacgcagctgagttgcgtatccgaacatttcagacagcggtacttcagcgtggatcttaacgccagtaacttcagattcctgacctttgagcataccacgacgacggctcaagtcaccgataacgtcaccggtgttctcttccggagtttctacttcaaccttcatgatcggctcaagcagaactggtttcgctttcttaaagccttctttaaaggcgatagaagcagccagtttaaacgccagttcagaggagtcaacgtcatggtaagaaccgaagtgcagacgaatacccatgtctactaccgggtagcctgccagcggacctgctttcagctgttcctggatacctttatcaacggccgggatgtattcgccagggattacaccacctttaatgtcgttgatgaactcgtagcctttcgggttactacccggctccagcgggtacatgtcgataacaacatgaccatactgaccacgaccaccagactgtttcgcgtgtttaccttcaacatcggtaactttctggcggatagtttcacggtaagcaacctgcggtttacctacgttcgcttcaacgttgaattcacgcttcatacggtcaacgatgatgtcgaggtgcagttcgcccatacccgcgatgatggtctggttagattcttcgtcagtccatacacggaaagacgggtcttctttagccagacggcccagagccagacccattttttcctggtcagctttggttttcggttcaactgcgatggagattaccggctcagggaattccatacgttccagaatgatcggcgcatccgggtcacacagggtgtcaccagtggttacgtctttcagaccgatagcagcagcgatgtcgcccgcgcgaacttctttgatctcttcacgtttgttagcgtgcatctgaacgatacgaccgaaacgctcacgtgcagctttcacggagttcagtacggtatcaccagagttaaccacaccggagtaaacacggaagaaggtcaggttaccaacaaacgggtcggtagcgattttgaacgccagtgcagagaacggctcgtcatcacttgcgtgacgttcagccggagtgtctttaccgtcgtccaggataccgttgatcgcaggtacgtcaaccggggatggcaggtaatcaattaccgcatccagcatcgcctgaacacctttgttcttgaacgcagaaccacaggttaccaggatgatttcgttgttcagaacgcgctgacgcagagcacctttgatttctgcttcagtcagttcttcaccacccaggtatttttccatcagctcttcagaagcttcagctgcggattcgatcaggttctggtgccattcgttagccagttcaaccatgtctgccgggatatcttcgtattcgaaggttacgccctggtcagcgtcgttccagttgatagctttcattttcaccaggtcaacaacaccggtgaaatgttcttcagcaccaatcgccagctgcagcggaaccgggttcgcgcccagacgggttttgatctggttaacaactttcaggaagttcgcacccatgcggtccattttgttaacgaacgcaatgcgcggaactttatatttgtttgcctgacgccatacggtttcagactgcggctgaacaccaccaactgcgcagtaaaccattaccgcaccatcgagaacacgcatggaacgttctacttcgattgtgaagtcaacgtgccccggggtgtcgatgatgttgatgcgatgcggctcatactgcttagccataccagaccagaatgcagtagtcgcagcggaagtgatggtaataccacgttcctgctcctgctccatccagtccatggttgcagcgccgtcatgaacttcaccgattttatggtttacaccggtgtagaacagaatacgttcggtagtagtggttttaccggcgtcgatgtgcgcactgataccgatgttacggtagcgtgcgatgggtgttgtacgagccatttgtttcctcgtttatcttttaggcgttcaatttaagtagcccaaagcgggctgcttactggaagcgcccgcctggtgactaaaactccgaagggataaccaacggtagtgtgcgaacgccttgttggcttcggccatacggtgaacgtcttcacgtttcttaactgcagtacctttgttttctgcagcatcagaaagttcgttcgccaggcgcagagccatggatttatcaccgcgtttacgagcagcttcaacgatccaacgcattgccagagcattacgacgaaccggacggacttcaactggtacctgataagtagaaccaccaacgcggcgagacttaacttctacagtcgggcgcacgttttcgagagctacttcgaatgcttccagttcagatttaccagagcgctgagccagggtctccagcgcgctgtatacgatagattcagcagtagattttttaccatctaccatcaggatatttacaaatttagccagcagttcacttccgaacttcggatccggcagaattttacgctgaccaatgacgcgacgacgtggcatggaaatactccgttgttaattcaggattgtccaaaactctacgagtttagtttgacatttaagttaaaacgtttggccttacttaacggagaaccattaagccttaggacgcttcacgccatacttggaacgagcctgcttacggtctttaacgccggagcagtcaagcgcaccacgtacggtgtggtaacgaacacccgggaggtctttaacacgaccgccacggatcaggatcacggagtgctcctgcaggttgtgaccttcaccaccgatgtaggaagtcacttcgaaaccgttagtcagacgaacacggcatactttacgcagcgcggagttcggtttacgaggagtggtagtatatacacgagtacatacgccacgtttttgcgggcatgcttccagcgcaggcacgttgcttttcgcaactttgcgagcacgtggtttgcgtaccagctggttaactgttgccattaaatagctcctggttttagcttttgcttcgtaaacacgtaataaaacgtcctcacacaatatgaggacgccgaattttagggcgatgccgaaaaggtgtcaagaaatatacaacgatcccgccatcaccaggccatctggctggggtgcttaaccgtaagtctgacgaaatcagtatagtcaatgagaatgatgtcgttgctaatttgaccagtcaaaccgcgggcaataaggtcttcgttcagggcatagaccttaatgggggcattacgcagactttcaaggtagcggttaccgtcaactgcggcagttacgccatcttgcaataatagcagttcgtctccttcactgagcagacgcagcagcgcagcaaaatccgtcagccagggactgcgatgtaatgtgtgcagcataaacgcctcaaaacctcaaaataacatcgtagttggcgagttcgcggcgtaaggcatctgcttcgagcggcgtggcttcgacaacaaagggtgtctgcggatctaacccgcgttcgcgcagactagccgcacaaacccagcactgttcaatgtcgtacagacccaacaatttaaaagtggcaatgtaatcacgcgccagcactgcatcgggcttttgtcctggcagcagctgaaaaacgccatcagctataaagaagacagccagatcgtcagttaatgcggaagttgccagtaaagcatctaaaccttcccggcctgcggctgtaccatgaggtgcagtagaaaaaacaaacgcaattcgtttcatcagaactgtaccaccctgtcacaggtcaggctggcttccgccagcgccccaagtccgcttaaggtaaatccctgctgaaggttactgctagccagccccagtcttccggcctccgtttcatcaacaacgccacggcgtaatgctgccgctacgcagatattcagcgccacaccatgttgcgcattcagttgttgccaggcccgtacgaggtcaaattcgtcacttgccggagaggtcaattggttagcgttatagaccccttcccgatagaaaaagacgctgcttaactcatggccatctgctatcagcgcctgcgcaaactgaaaagcactactcgcctgttgcgtaccgtatgctggcccggtcaccacgatggcaaaacgcattacttatcttgcccctggaaatcaccgctcttgaactggcggatgtagagatagacagtgtgtttggagatgttcaggcggtcagcaacctggttgatcgcatctttaatatcgaagatccctttctcgtagagattcagcacgatctgacgatttttggcgttattagaaacattgcgatcggcattcacttcttcgatggtgaactccagcgtttgggtaaccagatcttcaacagaagaggcaaagttgacgctactaccgacatccggggtttctggcggcacaaaggtgctcataatctggctgaagggaacatcaagattcatattgatgcacagcagaccaattacacgctgttcgcggttacgaatcgcgatagtcagggacttcattaatacgccgcttttggcgcgagtaaagtagcatttagaaacgctgctatccgctcccgtcatatcgtgcagcatacgtagcgccaggtcagtaattgggctaccaatcttccggcctgtatgttcaccgttagcaatgcgaatggcactacattttagatcctgcaaagagtgcaaaacgatttcacagtgggagccaataagcatcgctaacccgtccaccaccgcttcgtaggatttcagaatatcaaaatcggtctggtcgaaaggacgttgatccagtaaatccaactcactggtttcgttggttaaaaggctcctggacatgaaaaaaaacactccttttcaggagcctgtcgttaacttttcagggcaggctcattaatgatgcgggtaactaaattaatacagcggaggttccgctttccagcactaattatatccggcctgtaataaaaaaaccgccgcctggtcaggcggcggttcttaatgcttattttttagcagaatctgcggctttcgcatcagcttccggctttgcatcagccttcggcgctggtttcacatccagcagctctacgtcaaacaccagggtagaattcggtgggatccccggaacacccgctttgccgtaagccagttctggtggaataaccagtttgatcttaccgcctttcttgatgttcttcagaccttctgtccaacccgggataacaccgtccagacggaaagaaagcggttcaccacgggtgtaagagttgtcgaactctttaccgtcgatcagcgtacctttgtagttcactacaacagtatcgctgtctttcggtgcttcgcctttaccggcttctactacctgataaaccagaccagtactagaggttttcacacctttctctttggcaaatttctcgcggtactctttaccttttgcttcgttatcagccgcgtctttttccatcttcgcctgagcagaagacttcacgcgagcttcgaatgcttgtagagtctgttcgatctcttggtcggagagtttgcttttatcagcaaatgcatcctgaacaccagcgatcagctgatctttatccagtttgatgcccagtttttcttgttcttttagagagttttccatgtaacgacccaggctggcacccagtgcataagcacttttctgatcgtcatttttgaacgctgctttgctgtcagcagctgtagcaggttttgcagcttcagcagcaaaagtgattggtgcatgcagggcaacggccattgtggtcgccagcagcgttactttaaacagacttttcatccatatctccaggatcggggcatctcaccccagggttaactattatcagaagggtactataaagcgttgtcgaacaaatctacatacagacacgccctattatcatctattttcagactctttttgtttaaattagtttcgatgaccgcgaaatgagtgctgtctcgggcagcaaagttaagtagaatccgcggcgaccattcgacaaaagaggtgaatcatgcaggatttaagtttggaagcacgcctggcagagctggagagccgactggcttttcaggaaatcaccattgaagaactgaacgtcacggtgaccgctcatgaaatggagatggcgaaactgcgcgatcatctgcgtctgctgaccgagaagttaaaagccagccagccgagcaacatcgcgagccaggctgaagaaacgccaccgccacattattgaggcgtaaaaaaagcggggattccccgcttttttgtcactttttcggtattagtggcaaccgcaaccgccgttgcctttaccgccacagcagccttcgccaccgtgttcatgaccgtgatcgtggccatgaccgccgcagcaaccgtcgtggtcgtgatcgtggtggtgatcgtgcgcgccgtgaacgtgaccatgagccagttcttcttcagtcgcttcgcgaatcgccacaacttcaacgttgaatttcaggttctgaccggccagcatgtggttaccatcaaccacgacgtgatcgtcttcaaccgcagtgatttcaaccggtaccggaccctggtcggtttcagccaggaaacgcatacctacctgcagttcatcaacgcccataaatacgtctttaggaacacgttgcaccaggttttcgtcgtactgaccgtaagcgtcgttcgcgccaacagcgacatcaaatttgtcgccaacttcatgaccttccagcgccgtttccaggccagagatcagggaaccgtgaccatgcaggtagtccagcggcgcactcaccggagactcatcaaccaacacaccgtcttctgtacgtacctgataggccaggctgaccaccaggtcttttgctactttcatgatatctcctgagcatgggaagaatagtggcgcagattgtagcggaattctgcagccgtgtactcactagcttaaaaaaactcggcgcatatcgttagtccggatgaaaaatcccgatcacttgctcatctttgcgaacgtgatcgcgggcttctttgtctgcttctcgcatctgatgtccgcacttaacacattcaacaatatcaatattattttcgcgccacatcgccatactatcctgcgcctgacaggccgggcattttgcgcccgcaataaaacgttttcggattgccatctttaccctttactcaaattcatcccagccgtccagctggcgtcgttcttgttgcatttcacgctggaaaatctcttccagttcgcgtcgggcttccctggcgcgagaaatttgtacggtatcggcatgcattgggatgagctctcgcagcatccgcatatccaggcggcgaaaatgcagttgcgctcgctgtgcctgatgcggatgcatgccaagcgtgaccagcgtcttgcgccccagctctaacgcactggagaatgtttcacgggaaaactgcgtcacccctgcctgtaataactcatgcgcttccacacgtccgcgcgctcgcgcaagaatatgcaaatgcggaaagtgctgttggcatatttccaccagcttcatggtgtcttccggctcgttacaggtaatgacgatagactcagcggcctctgcacccgcagaacgtaaaagatcgacctgcgtggcgtcgccgtaataaactttgtagccgtatttacgcatcaggttaacggcgctgatatcccgctccagcacggtaatgcgcattttatttgccatcagcaaacgaccaatcacctgaccaaaacgcccgaagcccacgacaatgacctggggtttatcatcgttgacccacggtttttcgtcttcttcttccggtccgttaaactggcgggatagccatttatccaccagcttcatcagcaacggcgtggtcatcatggaaagcgtcaccgtcaccagcaacaacgccatctggtcgccctggaataagcgttgactagaagcggtagaaaagaggacaaaggcaaactcaccactctgactcaacacgccagcaaactgcatccgctcactgctacgcacgccatacaatcgcgccagcagatacagcacgagaattttcaccgccaccagcacaaccacgcttatcactacccacaacagatgggtataaagcaccccgaggttgagactcatgccgacagagataaagaacaaaccgagcagcaagcctttgaagggatcgatagccgtttccagttcatggcgatattcactttccgccagcagcacgcccgcaataaatgtaccgagcgccatgctcagccccagcgcatccataaacaatgcggaacccaacaccagcagcagcgtcgcggcggtgaacacttcccgcacgccagaagctgcaataaagcggaataccggacgcagtaaatagcgcccaccaatcagcatgccgacaaacgccagcaccttcatgccgaccttcatccagtcgaaatgttcgtctgcgctccccgccaacaacggcactaacgccagtgctgggattactgccagatcctgaaacagcagaacgctaaacccgagctggccggattcgctgcgattcatccctttctcacgcatcaattgcaacgccattgcagtactagacatcgcaaggccaatgccaccgaccaccgccgcctgccaggcgaaatccgtcagcatcaataatcccgccagcaacgccgcgcttaacagcacctgtgccgcgcctacgccaaaaatgctacgccgcagttgccaaagtttggagggattcaactcaaggccgatgataaacatcaggaataccacgccgagttcgctaaagtggaggatctcatcgacgtcgctaataaaccccagcccccacgggccaattgcaatccctgccagcaaatatcccaacacagcgccaatacccagccggcttgccagcggcaccgcagccaccgccgcgaagagaaacagcactcctgcgagtaaaaaatcggaaccttccatcagcggcctcctggagacagcggatttgccagccagtcaccgtaggctctggcgtggctcgccagctcctgtgcgctttgccgtctcgcccagtaaataatgatgggacttaaccaatgcatccggcacatgcccgccgccagttcaaaggggcgcagcacatcgctcatcgggtagcgattcagcgcgtcataacggtaagcactttccggctcgccggtggtaatcacgctacgccagtactttcccgccagttggtttcctcccggcccgctggcaaaaccacgacttaatacccggtccagccactctttcagtagcgccgggcagctataggtataaagaggatgctgaaagacaatcacctcgtgctcgcgcagtaatgcctgctcacgggggatatcaataaaaaaatcgggatagtgcgcgtaaaggtcgtgcacggtaacattgctgagctgcgtggccggtttaagcagtacccggtttgccacgctgtcctgagattccggatgggcatacagcagcaaaactttcgctggctgagacatcatccccctcccggtatggtttttgtgtatagtcgctgttttgggctaccattgcgcccggtgcggcagctcgcccatacattacattatcataatgataagttaacatagtctgaacatacggcaccttatgattgttttctccagcttacaaattcgtcgcggcgtgcgcgtcctgctggataatgccaccgccaccatcaaccctgggcagaaagtcggcctggtgggtaaaaacggctgtggtaaatctaccctgctggcattgctgaaaaatgaaatcagcgccgacggcggcagctacacctttccgggaagctggcaactggcgtgggtgaatcaggaaacgccggcgttaccgcaagcggcgctggaatatgtcattgacggcgaccgtgaatatcgtcaactagaagcgcagctacacgacgccaacgaacgtaacgacgggcacgccattgcgaccattcatggcaagctggatgctattgacgcatggagtattcgctcccgtgctgccagcctgctgcacggcctcggtttcagcaatgaacaactggagcgcccggtaagtgatttttccgggggctggcgtatgcgtcttaaccttgcccaggcgctgatttgccgtagtgacttgctgctgctcgacgaaccgactaaccacctcgatctcgatgccgttatctggctggaaaaatggctgaagagctatcagggcacgctgatcctgatctctcacgaccgcgacttcctcgatccgatcgtcgataaaattattcatatcgaacaacaaagcatgttcgagtacaccggcaactacagtagctttgaagtacagcgcgccacccgtctggcgcagcaacaagcgatgtacgaaagccagcaggaacgcgtagcgcatctgcaaagttatatcgaccgtttccgtgccaaagccaccaaagcgaagcaggcccagagccgcattaagatgctcgagcgtatggagctaattgcccccgcgcacgtcgacaacccgttccgctttagcttccgcgcgccggaaagcctgccaaatccgttactgaagatggaaaaagtcagcgcgggctatggcgatcgcattattctcgacagcattaaactgaacctggtgcccggcagccgtattggtctgttaggccgcaatggcgcgggtaaaagcacattaatcaaactgttagccggtgaacttgcgccagtcagcggtgaaattggtctggcgaaagggatcaaactcggctacttcgcccagcatcaacttgaatacctgcgcgccgacgaaagtcctattcaacatctggcacgtttagcgccgcaggagctggaacaaaaactgcgtgactacctcggcggctttggtttccagggcgataaagtaaccgaagaaacgcgccgcttctccggtggggaaaaagcccgcctggtgctggcattaattgtctggcagcggccgaatctgctgctgctcgacgaaccgactaaccaccttgacctcgacatgcgtcaggcactcaccgaagcattaatcgagtttgaaggcgcgctggttgtcgttagccacgaccgtcatttgctgcgttccaccactgacgatctctacctggttcacgatcgtaaagtcgaaccgttcgacggcgatctggaagattatcaacagtggttgagcgacgtacaaaagcaggaaaaccagaccgacgaagcgccaaaagagaatgcgaacagcgcccaggcacgtaaagatcagaagcgtcgggaagctgagctgcgtgcgcaaacccagccactgcgtaaagagattgcccgtctggaaaaagagatggagaagctgaacgcgcaactggcgcaggcggaagagaaactcggcgacagcgaactgtatgaccagagccgtaaagcggagttgaccgcctgcctgcaacagcaagccagcgccaaatccggcctggaagagtgcgaaatggcatggctggaagcccaggagcagcttgagcagatgctgctggaaggccaaagcaactgatggcgcagataacgacgaccgatgccaatgaattcagcagcagtgctgaattcatccccatgcgcggctttagcaattgtcatctgcaaaccatgctgccgcgtctgtttcgtcgtcaggtgaaattcaccccgtactggcagcggctggagttgcccgacggcgattttgtcgatcttgcgtggagtgaaaaccctgcacaggcgcaacataaacctcgtctggtggtgtttcacgggctggaaggcagtctcaacagcccttacgcccacggtctggttgaggcggcgcaaaagcgcggctggctgggcgtggtgatgcattttcgcggatgcagcggtgaaccaaaccgtatgcaccgcatttaccatagcggcgaaaccgaagacgccagttggtttttacgctggctgcaacgcgaatttggtcatgcgccaacggctgccgtcggctatagcctcggcggtaatatgctggcctgtttgctggcaaaggaaggcaatgatctcccggttgatgcggcggtgattgtctctgcgccgtttatgctggaagcctgtagctatcatatggaaaagggcttttcccgcgtttatcagcgttacttgctgaacctgttaaaagccaatgccgcgcgcaagctggcagcctaccccggaacgctgccgattaatctcgcgcagttaaaaagcgtacgtcgcatccgtgaatttgacgatctcatcaccgccagaattcacggctacgccgacgctatcgactattatcgtcagtgtagcgccatgccgatgctgaaccggatcgccaaaccgacgctgattattcacgccaaagacgatccgtttatggatcatcaggtgatcccgaaaccggaaagtctccccccgcaggtggagtatcaactgactgaacatggcggtcatgttggctttattggcggtacattacttcatccgcaaatgtggctggagagtcgcattcctgactggttaacaacgtatctggaggcgaaaagttgttgatattaacgtatctggaggcgaaatcatgttgattccgtggcaagacctctcccccgaaacgctggaaaatttaattgaaagctttgtgttacgtgaaggcaccgattatggtgaacatgagcgtacacttgaacagaaagtcgccgacgtcaaacgccagctacagtgcggagaagcggtgctggtatggagcgagctgcacgaaacggtcaatattatgccgcgcagtcagtttcgcgaataacctgcaaccgtcggcggacgagataataatgatagctaagtcatggagttactatgtctgccaaacatccggtcattgcggtaacaggatccagcggcgcggggaccaccaccaccagcctcgcgtttcgtaaaatattcgcgcagttaaatctgcatgcagctgaggtggaaggcgacagttttcaccgttacacccgcccggaaatggacatggcgatccgcaaagcgcgcgacgccgggcggcatatcagctacttcggccccgaggctaacgacttcggcctgctggaacaaaccttcattgaatacggtcagagcggcaaagggaaatctcgcaaatatctgcatacctacgacgaagccgtaccgtggaatcaggtaccggggacattcaccccctggcaacctttaccggaacccactgatgtactgttttatgaaggtttacacggcggcgtagtcacgccacagcataacgttgcgcagcatgtggacttactggtcggcgtggtgcctatcgttaaccttgagtggattcaaaaactgatccgcgacaccagcgagcgcgggcacagtcgagaagcagtgatggacagtgtagtgcgtagtatggaagactatatcaactacatcacaccgcagttttcccgcacccatcttaacttccagcgcgttcccaccgtcgacactagtaacccgttcgcggcaaaaggtatcccgagcctcgatgaaagctttgtggtgatccattttcgtaatctggaagggatcgatttcccctggctgctggcgatgttgcaaggcagtttcatttcccacatcaatacgttagtggtaccgggcggcaaaatgggtctggcaatggaattaattatgctgccgctggtgcaacgattgatggaaggaaagaaaatcgagtaactctgctattacgccggataaaatactatccggcttcacaacgggatagttaagtcacgcggcaaccacttcatagctgtgagtaatattcaccgctttttccagcatcaacgccacactacaatatttctcggcagagagatcaaccgcacgcgcaaccgctgcgtctttcaggtcgcgaccggtgacgataaaatgcagattaatgtgcgtaaacaggcgtggtgcctcttcgcggcgttcagaggtcaattttacttcacaatcgaccacatcctgacgccctttttgcaggatgctaaccacatcgatggcactgcaaccacccgccgccatcaacaccatttccatcggacttggtgctttatcgccactgttgccgtccattaaaatctgatgaccagaggcggattcgcccagaaaagttaacccttcgacccacttcactcgcgcttgcatttttgctactccactgcgtcaattttcctgacagagtacgcgtactaaccaaatcgcgcaacggaaggcgacctgggtcatgctgaagcgagacaccaggagacacaaagcgaaagctatgctaaaacagtcaggatgctacagtaatacattgatgtactgcatgtatgcaaaggacgtcacattaccgtgcagtacagttgatagccccttcccaggtagcgggaagcatatttcggcaatccagagacagcggcgttatctggctctggagaaagcttataacagaggataaccgcgcatggtgcttggcaaaccgcaaacagacccgactctcgaatggttcttgtctcattgccacattcataagtacccatccaagagcacgcttattcaccagggtgaaaaagcggaaacgctgtactacatcgttaaaggctctgtggcagtgctgatcaaagacgaagagggtaaagaaatgatcctctcctatctgaatcagggtgattttattggcgaactgggcctgtttgaagagggccaggaacgtagcgcatgggtacgtgcgaaaaccgcctgtgaagtggctgaaattagctacaaaaaatttcgccaattgattcaggtaaacccggacattctgatgcgtttgtctgcacagatggcgcgtcgtctgcaagtcactagtgagaaagtgggcaacctggcgttcctcgacgtgacgggccgcattgcacagactctgctgaatctggcaaaacaaccagacgctatgactcacccggacggtatgcaaatcaaaattacccgtcaggaaattggtcagattgtcggctgttctcgtgaaaccgtgggacgcattctgaagatgctggaagatcagaacctgatctccgcacacggtaaaaccatcgtcgtttacggcactcgttaatcccgtcggagtggcgcgttacctggtagcgcgccattttgtttcccccgatgtggcgcagactgatttatcaccccgatatcaactatgcacttcgacaaacgctggtgctatgtttgcccgtggccgttgggttaatgcttggcgaattacgattcggtctgctcttctccctcgttcctgcctgttgcaatattgcgggccttgatacgcctcataaacgttttttcaaacgcttaatcattggtgcgagcctgtttgccacctgtagcttgctgacacagctactactggcaaaagatgttcccctgccctttttgctgaccggattaacgctggtacttggcgtcactgctgagctggggccattgcacgcaaaattgcttcctgcaagcctgctcgccgccatttttaccctcagtttggcgggatacatgccggtctgggaaccgttgctcatctatgcgttgggcactctctggtacggattgtttaactggttttggttctggatctggcgcgaacaaccgctgcgcgagagtctaagtctgctgtaccgtgaactggcagattattgtgaagccaaatacagcctgcttacccagcacaccgaccctgaaaaagcgctgccgccgctgctggtgcgccagcaaaaagcggtcgatctaattacccagtgctatcagcaaatgcatatgctttccgcgcaaaataatactgactacaagcggatgctgcgtattttccaggaggcgctggatttacaggaacatattagcgtcagtttgcatcagccggaagaggtgcaaaagctggtcgagcgtagccatgcggaagaagttatccgctggaatgcgcaaaccgtcgccgctcgcctgcgcgtgctggctgatgacattctttaccatcgcctgccaacgcgttttacgatggaaaagcaaattggcgcactggaaaaaatcgcccgccagcatccggataatccggttgggcaattctgctactggcatttcagccgcatcgcccgcgtgctgcgcacccaaaaaccgctctatgcccgtgacttactggccgataaacagcggcgaatgccattacttccggcgctgaaaagttatctgagtctaaagtctccggcgctacgcaatgccggacgactcagtgtgatgttaagcgttgccagcctgatgggcaccgcgctgcatctgccgaagagctactggatcctgatgacggtattgctggtgacacaaaatggctatggcgcaacccgtctgaggattgtgaatcgctccgtgggaaccgtggtcgggttaatcattgcgggcgtggcgctgcactttaaaattcccgaaggttacaccctgacgttgatgctgattaccaccctcgccagctacctgatattgcgcaaaaactacggctgggcgacggtcggttttactattaccgcagtgtataccctgcaactattgtggttgaacggcgagcaatacatccttccgcgtcttatcgataccattattggttgtttaattgctttcggcggtactgtctggctgtggccgcagtggcagagcgggttattgcgtaaaaacgcccatgatgctttagaagcctatcaggaagcgattcgcttgattcttagcgaggatccgcaacctacgccactggcctggcagcgaatgcgggtaaatcaggcacataacactctgtataacagtttgaatcaggcgatgcaggaaccggcgtttaacagccattatctggcagatatgaaactgtgggtaacgcacagccagtttattgttgagcatattaatgccatgaccacgctggcgcgggaacaccgggcattgccacctgaactggcacaagagtatttacagtcttgtgaaatcgccattcagcgttgtcagcagcgactggagtatgacgaaccgggtagttctggcgatgccaatatcatggatgcgccggagatgcagccgcacgaaggcgcggcaggtacgctggagcagcatttacagcgggttattggtcatctgaacaccatgcacaccattagcagcatggcatggcgtcagcgaccgcatcacgggatttggctgagtcgcaagttgcgggatagcaaggcgtaatgcaggctaaaccatcggataaggcattcacgccgcatccgacatcttttgcctgatgcttcgtatttacgccccaaccaccttcgccaccgcgtgggcgaaacgttgcatcccttcatcgatatccgcatcttccaccaccaggctcggtgcaaaacgcatcacatccggtccggcattcagcaccattacgccagcctctgcgcccgcatacaggaaatcacgcgcccgacctttgtactgtggtttcagctctgcgccaatcaacagccccataccgcgaatatcgctaaatacatcgtactgctgatcgatcttctgcagatggtcaacaaaacgctggcgtttcgcctgaatgccttccagcacttcaggggtattgatgatatcaaacgccgcccccgctactgcacaggccagaggattaccgccgtaggtggaaccgtgagaaccaggatgaaacgcagaagcaatttccgccgtggtcagcatggcgctaatcgggaagccgccgcctaacgctttcgcagaggtcagaatatccggcgtaacgccgtagtgcatgtaagcaaacaaatcgccggtccgccccatcccgcactgcacttcatcaaacaccaataatgcctgatgttgatcgcacagctcgcgcaagccctgcaaaaactctggcgtcgctgccgtcacaccgccctcgccctggatcggctcaaccaccaccgcacaggtgtgatcatccatcaccgctttcactgcatggagatcgttaaagggaacgtggatgatgtctgccggtttcggcccaaagccgtcggaatattttggctgcccacccacgctaacggtaaacaggctgcgaccatgaaaagcgttatggaaggcaataattttggttttgaacgggctatgacgcacacaggcgtaatggcgtgccagtttaaaggcggtttcgttagcttccgtgccggagttcataaacaccacgcgttcggcaaacgttgcctcaatcagtttacgcccaagacgcagcgccggttcattggtgaaaacgttactgatatgccacagagtttcgccctgggtttttaacgcgttcaccagcgcaggatggcaatggcccaacgccgtaactgcaatgccacccgcgaaatcgacatactccttgccttgctgatcccagattcggctgccctgaccttttaccggaataaactctgccggagcataaatcggcaggatcacttcatcgaaagtcgcgcgtgtaattgctgtttgttcaattgccatctcatgatcaccctgttacgcataaacaaatgtgaaattataaccacaaaatatgcataaaaaatcactaaatggcaatcagaaatcagcgatgcaggaaattagccagcagttgatgtccttgttcgctaagaatactttctggatggaactgcacaccttccagatcccactggcgatggcgaatccccataatctctcgggtttcgctccaggccgtcacgtcaaagcacgctggtaaactgtcaggttccaccaccaggctatggtagcgtgtcacggtaagtggatttgccagcccccgaaatacgccctcaccgttatgtgtaatcgggctggttttgccgtgcatgacctttgcggcgcgcacaactttaccgccaaatgcctgcgccattgcctgatgaccgaggcagacgccaagaatcggcaagcgcccggcatagtggcgaataacgtcaagggagatcccggcttcatctggcgtacaggggccaggactgatgacaattttttgtggtttaagggcgtcgatatccgccagcgtcaacgcatcgttgcgcttaaccagcacatccgcccccagttcacaaaagtactggtagaggttccaggtaaaagaatcgtagttatctataagcaggatcatggcggctccggtacaaaagaaccgcgctattttactcagattccccggcttcgcttaccactttgctaaatatcatctgcagtgcggtgagatcccccattgccccactctgatttgcctgattccaggcctctttttcgataccctgccagctcagttgatatccggcatgaatcgccagttgctcgaagaagatccgctgtgccagaccacttcccacccggaagggatgcagcacgttgatttcacaatagtaatgcgccagccgctcgacgaacttcgctttctccaggccaaccagataaccttcttcctccagatcctgcatcagggcattgccctctttttcgatataagcaaagtggcagaacggcgtatcaccctgataaatatcaacttcacgcagttgccctgcccagtcgaaaatatcctgatacagctggcgatggatagttcgcaaatgcggtaaaccgcgcaccagcggaccaagctcaatggtcgcagcacgcagcgccgtcatttcgtaagcggcctgttccagccgctgctgctggcggatgttcagccggttacgcatgatatcaaggcctggataaagatacggatcgcgcccttcgccgaatttatcgctcatagtgactcctcagctcttcaaggcgcgctaaagcctctgcggcagtaagagtgactaaaggcatctcgacgccttcaagacggcgactggcctgaaaattacgattacgctgaagctcccagagacgggacttttgcttatcggtgagtttcttcacttgatgcctccctgaacgtgtccatttgccacaagtataagcggcaaatccgggttacgccgggagagcagaagcgcgggcaagattgcccgcgcgagaaatcattacggcaggactttagcggaaaggataactaccggtttactcggcacattctggtacggaccaacgtcatgagtcggcacctgggaaatcttatcggcaacgtccatgcctttcaccactttaccaaataccgcgtaaccgaaatcacgctgaccatggtcaaggaaggcgttatcggcaacgttgataaagaactggctggtggcgctgtctttgtcagcggtacgtgccatcgcgatggtgccacgcgtgttgcgcaggccgttatcggcttcatttttgattggcgggtttggttttttctgctgcatctgctcggtgaaaccgccgccctgaatcataaagccaggaatgacgcggtgaaaggtagtgttgttataaaaaccgctgttcacataatcgacaaagttttgcacagacactggcgctttttgtttatccagctccagttcgatgttaccagcactggttgtcaacaatacgtgcgggtcccctttcgctgccattgctgcgggagaaagagcagaaagagcgaaaacagcagccatcgccgccagggtgcttttgaacatgagatttccttaacaaacagagcagaaaaaaagcaagtgaagagattctaaatagccttcaagaacaaggccatccctttacctaattttacgtatctgaaatatatgtaacctgacgatcactttttattccgtgatcaaaatcacctcttaaaatgcaatttagcaaccgattgcaataaaacatttaaacagatcacaaaatcacctaaaatcgcccgctcgcggcatatcccgctatgccattttatttttgaacgcaggccaatcatgactaacagcaatcgcatcaagctcacatggattagctttctctcctacgcactgactggtgcgttggttattgtcaccgggatggtgatgggaaatatcgccgattatttcaatctgcctgtttccagtatgagtaataccttcaccttcctcaacgccggcattttaatctctatcttcctcaacgcctggctgatggaaatcgtcccgttgaaaacgcagttacgttttggctttctcctgatggtgctggcggttgccggtttgatgttcagccacagcctggcgctgttcagcgcggcgatgttcattctcggggtggtcagcggcatcaccatgagcattggtacattcctggtaacacaaatgtatgaagggcgtcagcgcggttcccgcctgttatttaccgactccttcttcagtatggctgggatgattttcccaatgatcgccgcgtttctactggcgcgcagcattgagtggtactgggtttatgcctgcatcgggctggtgtatgtcgctatttttattctgaccttcggctgtgagttcccggcgctgggcaaacatgcgccaaaaacggatgctccggtagagaaagaaaagtgggggatcggcgtactgtttctctctgttgcggcgttgtgctacatcctcggtcagttaggttttatctcctgggtgcctgagtatgccaaaggcctgggcatgagcctgaacgacgcgggcacgctggtgagtaacttctggatgagttacatggtcggcatgtgggcgttcagctttattcttcgcttctttgatttgcaacgcattctgaccgtactggctggtctggctgcgattctgatgtacgtctttaacaccggaacaccagcacatatggcgtggagtattctcgctctgggcttcttctccagcgcgatctataccaccatcatcaccctgggtagtcagcagaccaaagtaccgagcccaaaactggttaactttgtcctgacctgcggaaccatcggtactatgttgacctttgtggttaccggcccgatcgttgaacatagcggtccgcaggcggcactgcttacagcaaacggtctgtacgctgtcgtctttgtgatgtgcttcctgttaggtttcgtcagccgtcaccgtcagcataacaccctgacctctcattaattgctcatgccggacggcactatcgtcgtccggccttttcctctcttcccccgctacgtgcatctatttctataaacccgctcattttgtctattttttgcacaaacatgaaatatcagacaattccgtgacttaagaaaatttatacaaatcagcaatatacccattaaggagtatataaaggtgaatttgatttacatcaataagcggggttgctgaatcgttaaggtaggcggtaatagaaaagaaatcgaggcaaaaatgagcaaagtcagactcgcaattatcggtaacggtatggtcggccatcgctttatcgaagatcttcttgataaatctgatgcggccaactttgatattaccgttttctgtgaagaaccgcgcatcgcttatgaccgcgtacacctcagctcttacttctctcaccacaccgccgaagagctgagcctggtgcgcgaaggcttctacgagaaacacggcatcaaagttctggtcggcgaacgcgctatcaccatcaaccgtcaggagaaggtgattcactccagcgccggacgtaccgttttttatgacaagctgatcatggcaaccggttcctacccgtggatcccgccaatcaaaggttctgatactcaggactgctttgtctatcgcactattgaagacctcaacgccattgaatcctgcgcccgtcgcagcaaacgcggtgccgttgttggtggcggcctgttaggtctggaagccgcaggcgcgctgaaaaacttaggtattgaaacccacgttatcgaatttgcccctatgctgatggcagaacagcttgatcagatgggcggcgagcagctgcgtcgcaaaatcgaaagtatgggcgtgcgcgttcacaccagcaaaaacacccttgagattgtgcaggaaggtgttgaagcgcgtaaaaccatgcgttttgccgacggcagcgaactggaagtcgactttatcgtcttctctaccggtatccgtccgcgcgataagctggcaacccagtgtggtctggacgttgctccgcgtgggggtattgtcattaatgattcctgccagacttccgatccggatatctacgccatcggtgaatgcgcaagctggaacaaccgtgtatttggtctggtagcacctggctacaaaatggcgcaggtcgccgttgaccatattctcggtagcgaaaacgcctttgaaggtgctgaccttagcgccaagctgaaactgctgggcgtagacgtaggcggtattggtgatgcgcacggtcgcacgcctggcgcacgtagctacgtttacctcgacgaaagtaaagagatctacaaacgcctgattgtcagcgaagacaacaaaaccctgctcggtgcggtactggtgggcgataccagcgactacggtaacctgctgcaactggtgctgaacgctatcgaactgccggaaaacccggattccctgatcctgccagcacacagcggtagcggcaagccgtctatcggtgttgataaactgccggacagcgcgcaaatctgctcctgcttcgacgtcaccaaaggtgatctgattgctgccatcaacaaaggctgccacacagttgcggcgctgaaagctgaaaccaaagcgggtactggctgcggtggctgtatcccgctggtcactcaggtactgaacgcggaactggcgaaacagggcatcgaagttaacaacaacctgtgcgaacactttgcttatagccgtcaggaactgttccatttgatccgcgttgaaggcattaaaaccttcgaagaactgctggcgaaacacggcaaaggctacggttgtgaagtttgtaaaccaaccgtcggtagcctgctggcctcctgctggaacgaatacattctgaagccggaacatactccgctgcaggattctaacgacaacttcctcgctaacatccagaaagacggcacctacagcgtgatcccgcgttctccgggcggtgaaatcaccccggaagggctgatggcggtaggtcgtatcgcgcgtgaatttaatctctacaccaagatcactggctcccagcgtctggcgatgtttggcgcacagaaagacgatctgccggagatctggcgtcagctgattgaagccggcttcgaaaccggtcatgcctatgcgaaagcactgcgtatggcgaaaacctgcgtgggtagcacctggtgccgctacggcgttggcgacagcgtcggcctcggcgtggaactggaaaaccgctacaaaggcatccgtacgccgcacaaaatgaagttcggtgtctccggctgtacccgtgaatgtagtgaagctcagggtaaagacgtgggtattatcgccactgaaaaaggctggaacctgtatgtttgcggtaacggcggcatgaaaccgcgtcatgcggatctgctggcggcggatatcgatcgcgaaacgctgatcaaatatctcgaccgcttcatgatgttctacatccgtactgccgacaaactgacgcgtaccgcaccgtggttagaaaacctcgaaggcggcatcgattacctgaaagcagtgatcattgacgacaaactggggctgaacgcacatctggaagaagagatggcgcgcctgcgtgaagcggtactgtgtgagtggactgaaacggtcaatacgccgtctgcgcagactcgcttcaaacacttcatcaacagcgacaagcgtgacccgaacgtgcagatggtgccagagcgcgaacagcaccgtccggcaacgccgtatgaacgtatcccagtaactctggtggaggacaacgcatgagccagtggaaagacatctgcaaaatcgatgacatcctgcctgaaaccggcgtctgcgcgctgttaggtgacgagcaggtcgcgattttccgcccgtatcacagcgatcaggtgtttgcgatcagcaacatcgacccgttcttcgagtccagcgtgctgagtcgcggactgattgcggaacaccagggcgagctgtgggtcgccagcccgctgaaaaaacagcgttttcgcttaagcgacggcttgtgcatggaagacgaacagttttccgtcaaacattacgaagcgcgagtgaaagacggcgtggtgcagctgcgcggttaatgttttaacgggaggcgcaatgcctcccctttttgcatggtcctgtaataatcttcggtatattgcaggacattttttaaactttttgttttattttttgtttttattttttaaaggataatcaaatgtttacagacactattaataagtgtgcggctaacgctgcgcgcattgcacgcctgagcgcaaataacccgctcggcttttgggtcagctccgccatggcgggcgcgtatgtgggtcttgggatcatcctgattttcacgctcggtaatttgctcgatccatccgtacgccctttggtgatgggcgcgacctttggtatcgccttaacgctggtgattatcgccggttctgaactgttcaccggacacaccatgttcctcacctttggggtaaaagcgggcagcatcagccacgggcaaatgtgggcaatcctgccgcaaacctggctgggtaacctggtcggttccgtcttcgttgccatgctctatagctggggcggcggtagcctgctgccggtagataccagcatcgttcactccgtcgcgctggctaaaaccactgcaccggcaatggtactcttcttcaaaggtgcattgtgtaactggctggtttgcctggcaatctggatggcgctgcgcactgaaggggcggcgaaatttatcgctatctggtggtgtctgctggcatttatcgcgtccggctacgagcactctatcgctaacatgacgctgttcgcgctctcctggttcggcaaccacagcgaagcctacacgctggcgggtattggtcataacctgctgtgggtgacgctgggtaatactttaagtggtgccgtattcatgggattgggttattggtatgctacgccgaaagcgaatcgtccggttgcggacaaatttaatcaaactgaaacggctgccggttaattactaaggggtttttacgtggatcatttgcctatattttgccaattacgcgatcgcgactgtctgattgtcggcggtggtgatgtcgcggaacgcaaagcaaggttgctgttagacgcaggcgctcgcttaacggtgaatgcattagcgtttattccacagttcaccgcatgggcagatgcaggcatgttaaccctcgtcgaagggccatttgatgaaagccttctcgacacctgctggctggcgattgcagcgacggatgatgacgcgcttaaccagcgcgtcagcgaagccgctgaagctcgtcgcatcttctgtaacgtggtcgatgcgccgaaagccgccagctttattatgccgagcattattgaccgcagtccgctcatggtagcggtctcctctggcggcacctctccggttctggcacgcctgttgcgcgaaaaacttgaaagtctgctgccgttacatctgggccaggtagcgaaatacgccgggcaattacgcgggcgagtgaaacaacagttcgccacgatgggtgagcgtcgccgtttctgggagaaattgttcgttaacgaccgcctggcgcagagcctggcaaacaacgatcagaaagccattactgaaacgaccgaacagttaatcaacgaaccgctcgaccatcgcggtgaagtggtgctggttggtgcaggtccgggcgatgccgggctgctgacactgaaaggactgcaacaaattcagcaggcagatgtggtggtctacgaccgtctggtttctgacgatattatgaatctggtacgccgcgatgcggaccgtgttttcgtcggcaaacgcgcgggataccactgcgtaccccaggaagagattaaccagatcctgctgcgggaagcgcaaaaaggcaaacgcgtggtgcggctgaaaggtggcgatccgtttatttttggccgtggtggcgaagagctggaaacactgtgcaacgcgggtattccgttcagcgtggttccgggtattaccgcagcttctggttgctctgcctatagcggtattccactcacgcatcgcgattatgcccagagcgtacgcttaattaccggacacttaaaaaccggtggcgagctggactgggaaaacctggcggcagaaaaacagacgctggtgttctatatggggttgaatcaggccgcgactattcagcaaaagctgattgaacacggaatgccaggcgaaatgccggtggcaattgtcgaaaacggtacggcagtcacgcagcgcgtgattgacggtacgctcacacagctgggagaactggcgcagcaaatgaacagtccaagcctaattattattggtcgggttgttggcctgcgcgataaactgaactggttctccaaccattaatttaacccgggccagagaattctggccttcttaatgactctttttatatattcagcaaataaaacatagccccttaataaatattatctgctaatgggttatattcaccgttacagcgacttacaaaattaagtcattcgctcactgacgccaattaaatattcctgtatcgttcttaacgagcagtctgcttatattcatataatcaatgaatattaattaatatataatacatagggaatgtaaatgaacaaatttattaaagttgcactggtaggtgcagtactggctacgttaactgcatgtactggtcatattgaaaaccgtgataagaactgctcttacgactacctgctgcacccggcaatttctatttctaaaatcattggcggttgcggtcctactgcacagtaagtctctgacagaaatcggctaacaccggtttaattgcccgacgccctctggattttccgagggcgtatttgtttctatgtccttcttgcccccgcccgtaaaaatattttcactttaaattcaatttgataactacatccattagccacagcgcgatcctgtgcgaaattttgtgatcttcctccacattacataacatcatatgttgttatattcatcatgcattgtcatgttaccttttaaatgactgcaaactctcccctacaacgtattggacaagaaaaaggtatcgctatgggaagccaggaactccaacgcaagctcggattttgggccgttcttgcaatcgccgtcgggacaaccgtcggctccggtatttttgtatctgtgggtgaagtggcaaaagcagcgggcacgccgtggcttacggtgctcgcgtttgtcattggcgggttaattgtgatcccgcaaatgtgcgtctatgcggaactatccaccgcttatccggaaaatggcgcagattatgtttatctgaaaaatgccggaagccgaccgctggctttcctctccggctgggccagcttctgggccaacgatgcgccgagtttgagcattatggcgctggcgattgtcagcaatcttggctttttaacgcctatcgatccgttgctcggtaaatttatcgccgccggattaattatcgcctttatgttgctacacctgcgctccgttgaaggcggcgcagcgtttcagacgctaattaccatcgccaaaattatcccgttcactatcgtcattggccttgggatcttctggtttaaagcggagaattttgccgcccctaccaccactgcgattggcgcaacgggcagctttatggcgctgctggcggggatctctgccaccagttggagctataccggcatggcctctatctgttatatgaccggcgaaattaaaaaccccggaaaaaccatgccacgagcgctgattggttcctgtctgctggttctggtgctctacaccctgctggcgctggtgatttccggcctgatgcccttcgacaaactcgccaattctgaaacgccgatttccgacgccctgacctggatccccgcactcggcagcaccgctgggatctttgttgccatcacggcgatgatcgtcattcttggtagcctttccagctgcgtgatgtaccagccgcggctggaatacgcgatggcgaaagacaacctgttctttaaatgcttcggccatgtgcatccgaaatacaacacgccggatgtctccatcatcctgcaaggggcgctggggatcttcttcatcttcgtttccgatctcaccagcctgctgggttatttcaccctggtgatgtgtttcaaaaataccctcaccttcggctccatcatctggtgtcgtaaacgcgacgattacaaaccgctgtggcgtactccggctttcgggctgatgaccaccctcgccattgcgagtagcctcattctggtcgccagtacctttgtctgggcaccgattcccggccttatctgcgccgtcatcgttattgctactggtctgcctgcttacgccttctgggcgaagcgtagccgccagctcaacgctttgagctaatgttatctggagaaaataaaatgttggatattgataaaagcaccgtggactttctggtcaccgaaaatatggttcaggaagtggaaaaagttctcagccatgacgttccgctggtgcacgccatcgtggaagagatggtgaagcgcgacattgatcgtatttatttcgttgcctgcggaagcccactcaacgcggcgcaaacggcgaaacatctggcggatcgcttttccgatcttcaggtctacgccatttccggctgggagttctgcgataacaccccgtatcgcctcgacgatcgttgcgcagtaattggcgtttctgactacggtaaaaccgaagaggtaatcaaagcgctggagctgggccgggcctgcggcgcactcactgcggcgttcaccaaacgcgcggatagcccgattaccagcgcggcggaatttagcattgattatcaggccgactgtatctgggaaattcacctgccgctctgctacagcgtggtgctggagatgatcacccgcctcgcgccgaacgcggaaatcggcaagatcaaaaacgatctcaagcagttgccgaatgcgctcggtcatctggtacgcacctgggaagaaaaaggccgccagcttggtgaactggccagccagtggccgatgatttataccgttgctgcgggtccgctgcgtccgctgggttacaaagaaggcattgtaacgctgatggaatttacctggacgcacggctgcgtgattgagagcggagagttccgccatggcccgctggagattgtcgaaccgggcgttccgttcctgttcctgctcggcaatgatgaaagtcgccacaccaccgaacgcgccattaactttgttaaacagcgtactgacaacgtgatcgtcatcgattacgccgaaattagccaagggctgcacccgtggctggcaccgttcctgatgttcgtgccaatggagtggctctgctactacctgtctatttacaaagatcacaacccggatgaacgccgctattacggtggtctggtggaatattaatccctctcccggcccggcaacgggccggatttacgcaaggagttacccgatgaaaacaggtatgtttacctgcggccaccagcggctgcctattgaacacgcatttcgtgatgcaagcgagctgggttacgacggcatcgaaatttggggcggtcgcccgcacgcgttcgcgccggacttaaaagcgggcggcatcaaacaaatcaaggcgctggcgcagacgtatcagatgccgattatcggctatacgccagaaaccaacggctatccgtataacatgatgctgggcgatgaacatatgcgtcgcgaaagcctcgacatgatcaagctggcgatggatatggcaaaagagatgaacgcgggttatacgctgatttccgcggcccacgcgggctatctcacgccacctaatgttatctggggacggctggcagagaacctaagcgaactgtgtgagtacgcggaaaacatcggcatggatctaatcctcgaaccgttaacgccgtatgaaagcaacgtcgtgtgtaatgctaatgatgtgcttcatgcgctggcgctggtgcctagcccgcgcctgttcagcatggtcgacatttgcgcgccgtatgtccaggcggaaccggtgatgagttatttcgacaaactgggcgataaattacgtcatctgcatattgtcgacagcgacggggccagcgacacgcattacattcctggagaaggcaaaatgccgctgcgggaactgatgcgcgatattattgagcggggctatgagggttactgtacggtggagctggtgacgatgtatatgaacgagcccagactctatgcccgccaggcgctggaacgctttcgcgcgctgctgccggaggatgagagatgaaaaccctggcgacaatcggcgataactgcgtcgatatctacccgcaactgaataaagcgttttctggcggtaatgcggtcaatgtggcggtgtactgcactcgctacggcatacagccgggatgcattacctgggtgggtgacgatgactacggcacaaagctgaagcaggatctcgcccgcatgggcgtcgatatcagccatgtccatacgaaacacggcgttaccgcacaaactcaggtggaactgcacgacaatgatcgcgtttttggcgactacaccgaaggcgtgatggccgactttgccctgagtgaagaggattacgcctggctggcgcagtatgacattgtgcacgcggcaatctggggacatgcggaagacgcattcccacagctgcacgctgcgggcaaacttaccgctttcgacttctccgacaagtgggacagcccgctctggcagacactggtgccgcatctcgattttgcctttgcctccgcaccgcaagaagacgaaacgctgcgtctgaagatgaaagcgattgttgcccgtggcgcaggaacagtgattgtcacgctgggtgaaaacggcagcattgcctgggatggcgcgcagttctggcgtcaggctcctgaaccggtgacggttatcgacaccatgggtgccggagatagcttcattgccggattcctttgcggctggtctgcggggatgacattaccgcaggcgatagcgcagggaacggcgtgcgcggcgaaaaccattcagtaccacggtgcctggtaagtataacgttggcgtgagcatcttcacgccaacgtgctgttacttgccggaaaacgaccctataatccgagtaattcattctttatttcagggtcgattatgagtgctacggaccgctactctcatcaactcctctacgctaccgtccgccagcgactgctggatgatatcgcgcagggggtttaccaggcgggcaacagatccctaccgaaaacgagctttgtacacaatataacgtcagccgcattaccattcgcaaagccatcagcgacttagtggcagacggcgtactgatccgctggcagggaaaaggcacctttgtacaaagccagaaagttgaaaacgccctgcttactgtcagtggttttaccgattttggcgtcagtcaaggcaaggcgacgaaagagaaagtgatcgaacaggaacgggtcagcgccgcgccgttttgcgaaaagctgaacatccccggaaacagcgaagtgttccatctctgccgggtgatgtatctcgataaagagccgctgtttattgatagtagttggatcccgctgagccgttatcctgactttgatgagatttacgtcgaaggaagctccacctatcagttatttcaggagcgttttgacacgcgagtggtcagcgacaaaaagaccatcgatatctttgccgccacccgcccgcaggcaaaatggctgaaatgcgaactgggcgaaccgttgtttcgcatcagcaaaatcgcctttgatcagaatgacaaaccggtgcacgtctccgaactcttctgccgcgccaatcgcatcaccttaactattgataataaaagacattaaccgtaggccggataagatgcgccagcatcgcatccggcgatgctggcgcgttgaattttacatcccgtacgttcccctcaccctaaccctctccccaaaggggcgaggggaccgttcagtacggaatttagcttgacggtgctatccagcattaaatactggcaatactctcacgcaaaatccgcagcaccgtctcttcaccgctgcgattcgggttaatgcgaatcgcacaatgttcactttgtggattcgcctggcgaaacgttccggaaaggcgataaaagagcggcgggatttcatatttgctctctgcacccaccgggtaaggcaaggcaccgcgcttttgcgcctcttccagcactctggcggcaatcggctgatgaaactcgacaatcaacaccttgctctgcgcattagcaatcaccgcgcttttcacttccggcaccgcaccaccgttaagcaaagccagcaaccgttcagatacccctgcctgcaccgcgtgcatcactggcgcaaacaccagaccacgcaatacttccagcgcctgtgcgccctggatctggctaccgccggagtaaagcgtggcgcgaatacggttgataacatcagcatcgccgaccactgcaccaacaccctctggcccaaatagcttgaagcaggaaaatgtgctgacattcgcgccgcattcacagccgattcgagccaccttcatcaccgcatagttgtcatcggttaacgctggaacacctgccgcgcgcaacgttgccagcacatctgccagcacgtagctgtcctgcggctgctggcgcgtatgctgcaccagcgccgcatccggttgttgctcgtcgacgacctgcttcagtgcgctcaggtcattgaaatcaacagtaataagcgtcagccccatctgctcaataataacccgtgtcgtcgggtaaacaggcgcgtcatgcaccagaagacgctgccccggtttgagcaaagccgccagcccggcgcgaatcgcgccagtccccgcgtcctgcaccagcgccgcagcctgtgcgtgaaatgcatcagccagcacctgttccacacgctgggtaacgcgcggttgattcagtcctggcgttaagcctaaatcaccgccagtaagaaactcgctgccggggaaatggcgacaaatgctatccaccagcgcaaactgcttttgctgcgcctcaataatcgtcaggctttgcagaggaaacgtcttcataggtgccttccttaagccggaacgaacaggccaagccagtaaagaacattcagcagaataccggtgatcattactgccacgaccggtgccgccattttctgtaccggacggcccagggattcgttgaggaagtaaatggcaaccgcgatagagaatccggtataacccgccatcttaattgctgcgaaaatgctaccgaccagcagcgccacttccatcagcatattcatggcgttacggatgttatcgctcgcattacgcacgctcgggtagcgtcccagccatttgccgatgctacgaagcagcaagacttccgcgctaataaccactgcgcctaataccgctgcaaccatcggattcgggctgagatagtccaccgcataaacaaaggtaaagcccgcaactgcatacacacccgttgctaacgcggtggtggcaatcaacggcacaaaccccagtccgcgcataaattctgccagagccgcctgattaatcagcgtttggctttgttccggcgttacgcctgcggaatatgctttctccagtgtgaagatgctcacttcactgccagcaaaaatcttcatgctggcaacggcggcaatcaatgctcccacgatggcgatatagggtaagtttttgataatccgactcgtgcgttcttcaaacacgctaagcccgctggcatcaatgtcattttcatcacgatgacgcaggtcgtgagttatcgcgatccccagcagcatcaccatgccaataaagatttcgatggattcagggttaagatgtgggaaatagcgcacgactaccacacgggtcatcagtaccaccacggcggcgatcagactttgcttccagccaaactggtagaaaatcgccaccagcgggaacagtgcaaaagcactaaccaccgggctgcttaattcccccaggctacctaatacatccaccggcagcgcggtcagcagctggtttactggcaacaggcaagtaaggatcaacacgccccagatagcgccaagaccaaacgccatcaggctgtttatcgccaggacgccgaggatatcggtaggaagaaagagtaaccatgcgttgagcagcccggttttcagggtaaaagagatccccacgctggccacaaaaccaatgctcagaccaaaagcgatactccccgcctcgcgacggttcatatagccttcaatcagttgcggcaggatcgggcggatgccgtcatgaaaaacagccgcgctgcgatgcgccagaaggcttgtcatacccgtcaggcacgccaccacgataatctgaatatacagatccatagtcgtgccttttatttcagatggttaatcagcatcggaatcgcgtgttcgacgtgctcaacggaaaggccaaacgccacttttccttcagcgatcattttggcgatatgctcgtctttcgctttaatgcctggtttggcaatggtgcaacttttgttatagcctatcaccgcgatggcaatgctcaatgccgcgcccgcaccggtattacacgcgccgatgtaataatccagttgcccggatttcaccttcattgccgcttccatgtcgttgtgaatgaaaacttcaaaacagccaggagccgtcgcttcaatagtttttttaatctgctcacgctgtaagcctgcaacgccaatctttttcatgagtctgtccttattggaaaaattgagagggattttcacgtaacatcacatccacatcggcctgactgaatccactctggcgcaattgcggaataaaggtggttagtaaatagtcatagccataaccaccgttggcttttaaatgggagcggcgcgtaatatccatgctcagcatgacgcggttcagcaacccacggtcgcgtagcgcatgaagcatcgcaatacgcttttcgtccgggtagtaactgttcttgccgatggtgtcgaactgcacgtacgcgccgagatcgatcatcttcaaaatgttgtcgaggttgtctttcagatcgcagtgaccaacggtgacgcggctaagatcaaccccgtgggcttgtagcaacgccagttgctccagccccatcgtgctgaagctcgtatgcgtggagatcgggcgtccggtctggttatgcgccagcgcagcggcaataaataccttctcttccagcggcgtaatctttccttcgctggtgccgatctccgcgatgatcccggctttcagctccgtgccatcgataccctgttcaatttcatcgaccatctcctgcgccagttcctgcacgctgcgggtcgccacatgttccgggaaaaacgcgtcctggtaataaccggtacaggccaccacgttgatccccgtctcgcgcattacatcaagcataaattgcgcattgcgccccatgtaacggttggtcatctcaatcacattacgcacgccccgggtcatcaggtcgttcatctcctggcaaatgaacgcatactgatcaaggcggcagtccacgttgtttttaaagccggagagatcaatatgcagatgctcatgggcgagggtgtaacccgtcggatcaaaactcatagggtgtctcctgcaaaccggagggaggaaagaaaagagcgaccattttgtggcggtggcgcgcggaaaaattcacacacggtagcccccacatcagaaagcgtggtgcgcacaccgagctgcgtagcgatcatcccttgctgataaaccagcactggcaccacttcgcgggtatggtggctgtgaccaatggtcggatcgttgccgtgatccgccatcacgaccaggcaatcatctggctgcatcgcctcaacaagccgggcaaggttacggtcaacgacctgcaaacgttcggcataacgtgcgacgtcttctgcatgaccagcgaggtcggtttcctgaatgttggtgcaaataaacgccgtcggatgggtgttaaattcgttgagggtgatatccataatccgctggctatccaccagattttgccagctcacgccataaggattgttgacgatatctgccaccttacccaccagcacggttggcacgcctgcttcatacagtttttgtggcacctgcactttttcatcgacgccatagcccatatgcacgacctggaaaccgttgtcataagcgccagaacgcggcgcattgataccaataaagcgcccttctttgctttctgcggcatcgagaatgcgttgactgtcggttaacaggccaccaaatgtaatgacccgaccgacctgtacctgctcacgcacgatacgaccaattttgattgcgtcgtcaaaagagatcacagagagattggcggtaatgttatagacctggcctaaatccgcctcgagattatcgccaatcgcaaccgcctgattgacccacagaaattgcagatcatcgccacggcgctccacctgccagccagcggaaactaatgcctgctcaacacggtcaatcacatcgcgaaaaggcatccgcagcggcggtaacgggcgcgtgcctaaaatttcctgatgccccataaaggtatcgccaccttcatgttgcagctctgccacgccccaggttgcggaatcactcggctgcatatcgcctggcgcataacccaatgcgttgattagccccagcgtctccagcgttggtagctgcaaatgcggcaactggctcaggatgtgaccacatgtattcgctcccgcatcttgcggacgcaccagcgtgacatctttcattgcccctacgccaaagctatcaatcactaacaccacaaatcgcgccattacgcccccagagagtttccaagactgtcataacgaccgacgatttccggttcgccacgatgaataccggacaccagcaccacatcgctacgggtgacaaaaatctgcgtgcgaaaacagagcaccactgcactgcttaccggaaactcgcctgccagcggcagggtgtagtcgatactgctgtcatccacagttttgagattggtttcagtaatcttttgattttctggcgtaaacaccaacgcatgttgcgcatgaccacgacgatagtaaccgccgccgtagcagtagctgtcgccacggaaatgatgggagatttcacttaaccagagcatcgcgatacgttcaggctgatcgccctgctggtttgccggaatagtgcccgtcagcgcatgaccgggttcggcatgagtcacaccgtattgcgccagtaatggcaggctagtgcagctggtcgcactaggcgcgttcagttgctcaagtgcaataccagatttcgccagttgatcccgtgcctgtatcagcgtgtgaagattcggtgtcggcaaaacttttccgacagcctcatcccaaagcaggcaagggaaatgggtaagtccggctaaatgcagccctggcagattctggatttcggcgacaatctccggcaacaccttgagggcaaaaccgctctcctggcccggataaagaaaatcatcgtcgctataaactttaagcagcacagactggattcgcccggccttcaccgccgccgcagaaacttcccgcgctttgtcgagagtaaacacggtgatgacgtcggtgccctgttcaacggcgtcagcaacctgatgacaagggatttgtaccagatgcccctgatgcgccacaggcaaaccagcgcggcgcatgactcgcgcctctttgtaatccaccgccacaatgccgctgtagcctaatgccagcaatttttccgccagccacggattacgaccaaactgcttggtcatcagatacagttcaatgccgtaaagccgcgccgtctcaatcagccgcttaccgttttccagtatctgatccacgtcgatcacccagctgtccggggcgatcttgccctgctgccacaggcttagtgcggcggaaatcagcgccgggttctggcgtttcaatgcttctacaaacatcttgttgcctcgtttctgttccttgaattaaatattcatttttttgaatatttaggttgtgcgacgtggatttgtcgggagcttcaaacctcttcgttagcagccatccataatccataaaggttggccagcaaatagccttcttcacacgggttaacttccagtgcgaattccttcaacaacacctgatgcaattgcacaacggcttgccagtggctggattgcgccagttctgccagcaactcgttatccagcggctctatttcttcaccacggcgactgcgcatcagtgcactcgccatatgtgtcatcgccatcgttccttgctcactgcgcaccggcagatggcactctgtttccagtacgttgacgacctgcatcatgcctttgcagatgtccttatcaataacgcctgcctcgcaaagcaggttgagtctggtttccatatcagatgcctttcgtttaataactcggttcctgttccccactcactacccgttgttgatgggcgagcagggcgtgtttatctacaacggcacgcagcagttgttgcattgggtaatcatcgactcgcgtcaggaccacggcttcggtggcctgtaaaaatcgcggatcgtctgtgagcggcgtcgcctctaatcccagcatggtcagttcgttttccgccaccacgttccagatcaccgcatcgacatcgcctttaacaatgcgttgtaaactctcgtgataagagagatcgactcgttccacatcactaccgccaaaaaaaacatcggtcatgattttctgatccgcgctacggttatccagccccacgcgcttcacgtttgcggactcgcctttacggcaaatcaactggtgctcgccaacgtaggtgtgcggccccaactccagcgcgaggcataagcctttttgcgtgagataactttccgccgctagtcggctaaccaccgccatgtcatacacgccattaagcagacactccacgcgaatatccgcgccacgcatgtgcgcatagtaaaaaggaatgccatcaaactgggctttcaatccgctcgccaggccttcgtacaaacgggtatagggcaagggcattgcacataccacgttgttgatatccacatgagtcagcaatgctttgttatccatctcgaccagataactgccattgcgcccacggcgttcaatccgtatcgctccgctactttccagcgttttcaacgcggcctgcgtcaggccaacggaactacggcattcatttgccagctcatctatggttttcaatcgattaccgcacttttcacccaacaaataacgggccagcgtcgtgatgacgacgccttcttttttgataaacgttcgacgcataataaattttcagtaaattgaatatttatatcttcaggaatttgaagataaggcgcaacagcgagatgtggaaacggcgaggcacttcacattttttcggattattgcaaatgaggataaaaaaaccgggtttccccggtttcagagtgatgataaaagcaaaattgcctgatgcgctacgcttatcaggcctacatttccttgcaatatgtgcattactttgtaggccggataaggcgttcacgccgcatccggcatgaacaaagcgcaatttgccagcaatagtgaattacggcttcgccacaaaaccaatcgcttcgtacaccgcttttagcgtacgggaagcgtgcgcgctggctttttccgcgccatctttcatcacctgttgcaggaaggcttcatcgttgcggaaacggtgatagcgttcctgcaattcagtcagcataccggaaacggcatcagccacttcacctttcagatgaccatacatcttgccttcgaactgtttttccagttctgggatgctctggcccgttaccgcactaaggatatccaacaggttggaaacgcccgctttgttctgcacatcgtagcgaactaccggcggctcgtcggagtcagtgaccgcacgtttgattttcttcactacgcttttcgggtcttccagcaggccgataacgttattgcgattatcgtcagacttggacatcttcttggtcggctccagcaggctcattacgcgcgcgccagatttcggaataaacggctccggcaccttaaagatctcgccatacagcgcgttgaaacgctgggcaatatcgcggctcagttcgaggtgctgtttctggtcttcacccaccggtaccagattagtttgatacagcaggatgtccgctgccatcagcaccggatagtcaaacagaccagcgttgatgttctcggcataacgcgcagatttatctttaaactgcgtcatgcgactcagttcgccgaagtaggtatagcagttcagtgcccagcctaactgtgcatgttccggcacgtgggactgaacaaaaatggtgcttttctcaggatcgataccacaagccagatacaaggccagcgtatccagcgtcgctttacgcagcttctgtgcatcctggcgcacggtgatcgcgtgttggtcaacgatacagtaaatgcaatggtagtcatcctgcatgtttacccactgacgcagcgcacccatgtagttaccaatggtcaattcaccactgggctgtgcgccactaaaaacgatgggcttagtcatttttgctttcctgattttcgctatgcggaagccctaatgcgggcagaaggtcatttatagactgataaattacatcaggctggctgagatcgatagcctcgccgtagttatatccgtaggttaagccaacacttgggcaacctgccgcttttgccgcctgaatatcattgcgactgtcgccgacaaacagcatctgttgtggggcaattcccatccgctcagccaccagtaacagcgggtccggatgcggttttttgttttgcacatcatcaccaccaatcaccacgctgaagtatttggcgatatctaaggcttcgagcagcggcgcgacgaacggcgtcggtttgttggtgaccaggcctagcggcaggcctttagcctgcaacgcgcccaacgtatcggcaacgtgcgggaacaaaaacgtcccctcttcggcaacctcgccatagtagcgatcgaacagtttacgcagaatacgtacctgttcttctgccggaatgtcgtcatcaacgggcggtttacccattgttttacgctgagtcgcacgttcctgacgcgcccaggtcaatgcgcgctccatcagaacatctgcgccgttaccaatccaggtaataacgcgttcttcacctgcgacgggcaactccagcgcatacagcgccatatctaccgcagcagcaagaccaggagcactgtcgaccagcgtaccatcaagatcaaaagcgacgccgcgaatatcttcaaacttattcatgacttacctttgccagttcactgcgcatttcatcaatgacttttttgtagtctggctggtcgaagattgcgctaccggcgacgaacatatccgcgcccgccgcagcgatttcgccaatgttgttcaccttcacgccaccgtccacttctagtcgaatgtcaaagccagactcgtcgatacggcgacgtacttcgcgcagtttatccagtgtttgaggaatgaaagactgaccgccgaaaccagggttgacggacatcagcaggatcacatccagcttatccatcacgtaatccagatagctcagaggtgtcgccgggttaaataccagacccgctttacagccattttctttaatcagttgcagcgtgcggtcaacatgctcggaggcttctggatgaaaggtaatgatgctggcaccagcggcagcgaaatcaggcacaatgcgatcgacgggtttcaccatcaggtgtacgtcgataggggcggtaatgccatagttacgcaaggatttcagcaccattggcccaatcgtcagattgggaacatagtggttatccatgacgtcaaaatgcacgacatcagcgccagctgccagggcttttgcggtatcttcacccaggcgggcaaaatcagcgctcagaatactgggggcaatcaaatactgtttcatccgcttctccttgagaattattttttcgcgggactaacgactcctggtttgtacaaagccagcagttcgtccacctttttacgtgtgccgccgttgctgcttatactgcgtcgaactttgacgacatgcaattttgcgcgctgataccactcacgcgttaacatcgtatcgtgattggagatcagcactggaatatggcgctcaaccagaccttcggcgatctccgccagatgcgcttgttgttcaagcgtaaaactgtttgtgtgatacgccgtaaagttggcggtcgcagacagcggtgcataaggcggatcgcaatagacgacggatgcatcatctgcgcgcgccatgctatcggcgtaagactcacaatagaaaaaggcattctgcgctttttcagcgaagtgatacaactctgcttccgggaaatagggttttttgtagcggccgaacggcacgttaaactcaccgcgcagattgtaacgacacaggccgttgtaaccgtagcggttcaaatataaaaacagtaccgcccgacggaacggatcctggcttttgttgaactcttcgcggaactgatagtaaacctcggcgcaatttgtttcgggaacaaacagctcgcgtgcggcctgtacgtactcatcagtacgcatcttcacaatgttatagagactgatcaggtcgctattgatatcggcaaggatataacgagaaaagtcggtgttgagaaacacgctcccggcacctacaaaaggctcaaccagacattcgcccttgggcaaatgccgtttaatatcatcaagcaggggatacttgccccctgcccacttcaaaaaagcgcgatttttcttcatgctgactaactaattacaccttctccggctgtggagaaagctccgacagcatccagcgcttcaggcaactcccgcaacgataaaccattgcgggagataaccttgattacttcagatcggcctgtacctgacgcagcggtttcgcccacgggtttttggcctggacatctgctggcaatgtagataccgcttttttcgcctcttctttgctagcgtacacgccagaaaccaggacataccacggctgaccattacgcgtcgtttcatagacaacgtagtttttcagattctctttcttcgcccaaccgttcaggttgtcgtagttagaggaactgctcagctgcagagtgtaatggctggacggtgcgcttttcaagctaccaacattacctgcggtcttcgccccagcagcgggtgttgctgtggtttgcgccggggatgccgtctgtactggagccgtagtcgccgtctcttttggtgctggcgtagaagtcgcagccggtgccttcgtgctcgccacaggggcagctggttcagtacgcttcggcgtctgtgctaccggcttcggctccgttttcacggttgcttgcggttttttcggttcaatcaccgcctgctgacgagctgggcgcgtagtggacggacgttcagcggtttgcgttttcgccgtgtcacggcttgcattgccattgcgaacaggcgcaaccgttgcgggttcagtcggcaacgtggaattgaccgccacattgttcagctgttgctgattttgtggctgggtcagcgcattgttcaggtcaccctgcacttcaacacgttgttgaccatccgttgccaccggggtttgcccttgagtcggcgtagaagagatcggtggcagagaaacatcctgctgagtattttccgcagacgtggttcccggcgctggctgcacgccattcgcctgatcggtcgcattgccagcaagatcaatactcttctcgccagacgcggtttgatcgctggaagtggtgctgggggcttttagcgcagaaccgataccgatgatcaacagcagtagaaccagaatgccgacgcccatcatcatatactgacgagaagcgggtttactggctgcttttttgcgcttacgcggacgacgctctacgcgctcttcatccacggtttcatcttcggattcgtcaatttcttcttcgatttccggttcctcattgcgctctttttgcgcacgagtcggacggcgatcgtcagtgtcatcaagttcaatatcatcaaaattgatctgcggttcgccacgttcagtacgctcagaacgttcagaagattgacgagaacgaccagtacgacgatcgctgggatcgggtttcagctcgtcttctggtttgaattcatccatttaacaccccactaaaaggttaatgcttaccacgttgcaattaacctgaagctaatagaccgcttgataagcggcctgacctttcttgttgttacgcactttgacaatcggcaatggcgttaagaacaagctcgtggctaacgccgctgcgaacttcactcttaccaattgccaacggaagaattaagcgcatctctcccgcaaggactttcttgtcacgcagcatatgcggtaaatacgcctgcgcggacatttcgcgcggcccattgaccggtaacccagcccgcttgagcagggttataatacgctgcgtttcggcagaactaaactgcccgagacgttcgctcgtccgcgccgccatcaccatacccgcagcgaccgcttcaccatgtaaccaattgccataccccatttcagcttcaatggcatgaccaaaggtgtgtcccagattcagtaaagcacgtaacccggtttcgcgctcgtcggcggcgacaacttctgccttcagttcacaacaacggcgaatacagtacgccattgccggaccgtccagacgcaacaacgcatccagattctcttccagccagttaaaaaacgcaccgtcaagaataatgccgtatttgatgacttctgccagcccgctcgctaactcacgcgggggaagcgttttcagacagtcgagatccaccaccacactagcaggttggtagaacgcgccaatcatgtttttaccgaggggatggttgaccgcagttttgccgccaacggaggaatcgacctggctcagtaacgtcgtcgggacttgaatgaaacggacaccgcgctgataactcgccgccgcgaagccggtcagatcgcccactacgccgccgccaagcgccaccagcgtagtatcgcgaccatgcggtttttgtaacaacgccgtaaagacggtatcgagtacagccaggcttttatactgctcgccgtcagggaggataacgctatcgacgttaacacccgcctgttcaagtacgccgcggaccttatcgagatacagaggagccagggtttcgttggtgaccaacatgacctgctcgccgcttttcagcggtaagaaactagctggttcattaaacaaaccagatgcgatggtaattgggtaactacgttccccgagagtaacgacaatcctctccataacgcgacatccaccttaattactgtacccgcagacgagtgtatataaagccagaattagttgctttccagcatgtgaataatctggtttgcaaccactttagcgctttgatcatcagtacgaatggtcacgtcggcaatctcttcatacagcggattgcgttcattggccaacgcttccagaacttcacgcggcggtgtttcaacgtgcagcaacgggcgttttttatcacgctgcgtgcgtgcaagttgcttttcgatggtcgtttcaagataaacgacaacgccacgagcggaaagacggttacgcgtttcacgggatttcacagagccgccgccagtagccagcacaataccctgtttctcggtcaactcattgatgaccttttcttcgcgatcgcggaagccttcttcgccttctaaatcgaaaacccagcccacatcagctccggttcgtttctcaatctcttgatcggaatcgtaaaattccatattgagttgttgagctaactggcgcccaatagtgctttttccggcacccataggcccaaccagaaagatattgcgtttctctgccattttttcggtactactaagactattcgttaatgataaacccgcttcgctcagagagcgccgcaggacatgaactgaaacctcataagatattgcgagagtcagactgaaaattatctcaatactccagcgggtttggcaactgaataaatcacccatccctctgcatatctggtcgctgcaagcgcgctgccttgctaccaccgctctggcgataaatcaccgggtaagattagcgtaaaaaagacagcaaaatgccgcctgaatgataaatcatcatcatggaacgcaggcagcgaagagcaccaactctcaaatcggtactccttgtatgctaaatacctgcgcgcgtcaaatagatgaaacacgttcagcgtaaaaacattaccgcttttacggctgtttactcactggaaaccagtcgtggcgtgataaacaccactaactcgcgtcgttcatcttcttttccgtcatgacgaaatgattgcccgaaccagggaatgtcgccaagcaacggtacgctatcctgaccgcttttatttttacgggtaaaaatgccgcccagcgccaacgtttctccgcttttgacctcgacctgcgtttcgatctcctgcttatcaatcgccagcacttcgccatcggcctgctgtagcacctgccccggaacgttctggctgatgtgtaatttcagccggatgcgacctttttgtaacaccgtgggcgtgacctccatccccaggacggcctctttaaattccacgctcgtcgcgccactttccccgctggaaacctgatatggaatttcgctcccctgtttaatgctggcaggctgaagatgactggccagcagacgcggactggcgataatatccagctgctgtttttgttcgagcgcggaaagctcaagatccagcaagcgtccgttgatgcgcccaatgttaaaaccgacatgcgttgtcgccgtcgctacggagaggtcgctaccaagcgtggtgacttgcccaacgccaccagcgtgttgcgcatcggccagcgtccatttcacgcctaactcacgcaaacttttttcattaatggtgacaatatgcgcgctcagctcaacctgcccgaccggcagatccatttgcgctacccactgttcaagcgcgcttaacgccgttttgttatctcgtagcaaaaggcgattggtgcgtttatcgacggtcatactccctttggcactcagcagcttctcccccgctttcgccagttctcccgcgtcggcgtattgcagggttatactgcgattttccagcggcagatttgcctgcgcccgcgcctgctccgcctcctggcgggcgatattgttattctgccaggcaatggaatgcacactgagaatgttgccttcctgccgcgttatcagtccggcgcttttcactacagtttgtagtgcctgcttccagggaacatctgttagatgtaagctcaccgtaccgctgacgtctgggctcacgaccaggttcaacttctcctgttcagccagcgcctgcaacacctgagctaccggaacgtcatccaccatcagcgtcactttttgcggctttgccgcctgtacgccgggtatcagcatcaacagtagtgcggctatccattgcttcatttgtatctccttgccgttgccacaaccattgtggcggttcgcagtttgtcccggtacccagcgttagtacgtctggcgtcagctgtaaaattgtccagccgttttccagcacatcgttttgctgcacccgtcgccatttcttttgcccgtcttttattacaccgatgatgcgctcgcctcgccctaccatcccctgatagcgccactggctaagttcgctaatccggcatagatcttccggcggtttaaaagggtcacgcataccggttaaaaggcacaatgcaatacctgccaacaaccagcgtttaaccctcatgcggcgtctccagttgtagcgtgaacaaaagatcatcaccttccacgcttaagctaaaacggctcacgctgacgttgcgctctgccagccgtgtaaatgcgctcggcactgcttcccacagcgttttcaacgccaactcgcctccctgcgcggatggatgccaggaaaccagttgcgcgccggataactgaaaatccagtgggctaaagggcagcgttttttcctcgctgaagggagcggtgtctaccaggcgatacagtgcggcccactgctggtgatgacttgcccgtagtcgaattaatgcgtcgcgctcttcatggtgtgtgctactcagaaaaatgagcgtaactaacatcagcaaccagaatgcccagcaaagctggcggaggcggggacttgtggcgaaccaccagtcaaagaacatgttcatcgctaaccttccttgttaactgatactcaaattgccagcgtccctgcgcatcctgctgcgtggctccccgctgattgagatgaaaagatgcatcctggcggagactcgtttctagtgcgtttaacgcggtaatgcttgttgtcagccccttgatctccagcgttccctgctgccagcttatcgttgtcagccaggcgtgctcgggtaaaagcgccgccagtgcttccagcgcagattgccagtcgcgggtaaattgtcgctggcgctgccgttggctacgctgttcgcgtaactgctgttgctccagcaaacgtggcttcgttatctgtaagctgcgggcgagttgttgttccgcctgaagcaaaactgcgtctatgcgcgcttcggcgctgcctgtcagacgcagtattagcgttatcccgacggccagcagcagaggcgcaacgaacatcagcaaccagaaacgcagaaaagcggtccggcgttgctgtcgccagggcaaaaaattaattggcgggttcatcagtacgccttcccaagcgccagccccagcgcgatggcaaagtctccacctggcggcggtagcggcggctgacgaacagaaacggcctcccagggatcaaatccgccttcgccacatatcgcgacgctttcgggatcaacggataacgctgccgccagctccttcgcgctagtcatccccaccgccagtttgcgcccccagctatagcgcgtcgcccacagccactgttcgttatcacgccaggccagacattgctgatgagaaggtaaaaaaggcaggaatcgctgtaatgcactggcatccggggtgatcgcgctcacatgaacacgcaacctttctgccagagtaagcagcgttgccagctctttgctttgcgcggcagtcacgttataggcgggactgagactgtcttcgctgtaatcgaagcgcagggagtccggatccatatccagctcgcgggccatcgtcccactcagccaggccgtttgctcccgctcaccaagggacatgctcgggcgcggaaaactccgctgtaatgtgcgactggcgggaaacgccaacataatgtgatgacgctgcggcagttcgcgactccacggtaacaacgttttagccagctgctgcgcatcaacaatccgcccatctttgataatgtcgttctccagcggcaaccgccaccagcgttgcaaaaagcattcttttgcgccccgcacgatcgcaaccgctaccgcttcttgctgttgtaaatgcaaaccaatttgccagatcttaaatgccattgtgatgatctccttatcacccgtcactctgacgggtatatcaatgcgtctggcttgcctttatactaccgcgcgtttgtttataaactgcccaaatgaaactaaatgggaaatttccagtgaagttcgtaaagtattttttgatccttgcagtctgttgcattctgctgggagcaggcagcatttatggcctataccgctacatcgagccacaactgccggatgtggcgacattaaaagatgttcgcctgcaaattccgatgcagatttacagcgccgatggcgagctgattgctcaatacggtgagaaacgtcgtattccggttacgttggatcaaatcccaccggagatggtgaaagcctttatcgcgacagaagacagccgcttctacgagcatcacggcgttgacccggtggggatcttccgtgcagcaagcgtggcgctgttctccggtcacgcgagtcaaggggcaagtaccattacccagcagctggcgagaaacttcttcctcagtccagaacgcacgctgatgcgtaagattaaggaagtcttcctcgcgattcgcattgaacagctgctgacgaaagacgagatcctcgagctttatctgaacaagatttaccttggttaccgcgcctatggtgtcggtgctgcggcacaagtctatttcggaaaaacggtcgaccaactgacgctgaacgaaatggcggtgatagccgggctgccgaaagcgccttccaccttcaacccgctctacagcatggatcgtgccgtcgcgcggcgtaacgtcgtgctgagccggatgctggatgaagggtatatcacccaacaacagttcgatcagacacgcactgaggcgattaacgctaactatcacgcgccggagattgctttctctgcgccgtacctgagcgaaatggtgcgccaggagatgtataaccgttatggcgaaagtgcctatgaagacggttatcgcatttacaccaccatcacccgcaaagtgcagcaggccgcgcagcaggcggtacgtaataacgtgctggactacgacatgcgccacggctatcgcggcccggcaaatgtgctgtggaaagtgggcgagagcgcgtgggataacaacaagattaccgatacgctgaaggcgctgccaacctatggtccgctgctgcctgccgcagtcaccagcgccaatcctcagcaagcgacggcgatgctggcggacgggagcaccgtcgcattgagtatggaaggcgttcgctgggcgcgtccttaccgtagcgatactcagcaaggaccgacgccgcgtaaagtgaccgatgttctgcaaacgggtcagcaaatctgggttcgtcaggttggcgatgcatggtggctggcacaagtgccggaagtgaacagcgcgctggtgagcatcaatccgcaaaacggtgccgttatggcgctggtcggtggctttgatttcaatcagagcaagtttaaccgcgccacccaggcactgcgtcaggtgggttccaacatcaaaccgttcctctacaccgcggcgatggataaaggtctgacgctggcaagtatgttgaacgatgtgccaatttctcgctgggatgcaagtgccggttctgactggcagccgaagaacagtccaccgcagtatgctggtccaattcgcttacgtcaggggctgggtcagagcaaaaacgtggtgatggtacgcgcaatgcgggcgatgggcgtcgactacgctgcagaatatctgcaacgcttcggcttcccggcacaaaacattgtccacaccgaaagcctggcgctgggtagtgcgtccttcaccccaatgcaggtggcgcgcggctacgcggtcatggcgaacggcggcttcctggtggacccgtggtttatcagcaaaattgaaaacgatcagggcggcgtgattttcgaagcgaaaccgaaagtagcctgcccggaatgcgatattccggtgatttacggtgatacgcagaaaagcaacgtgctggaaaataacgatgttgaagatgtcgctatctcccgcgagcagcagaatgtttctgtaccaatgccgcagctggagcaggcaaatcaggcgttagtggcgaagactggcgcgcaggagtacgcaccgcacgtcatcaacactccgctggcattcctgattaagagtgctttgaacaccaatatctttggtgagccaggctggcagggtactggctggcgtgcaggtcgtgatttgcagcgtcgcgatatcggcgggaaaaccgggaccactaacagtagcaaagatgcgtggttcagcggttacggtccgggcgttgtgaccagcgtctggattggctttgatgatcaccgtcgtaatctcggtcatacaacggcttccggagcgattaaagatcagatcagtggttacgaaggcggtgccaagagtgcccagcctgcatgggacgcttatatgaaagccgttcttgaaggtgtgccggagcagccgctgacgccgccaccgggtattgtgacggtgaatatcgatcgcagcaccgggcagttagctaatggtggcaacagccgcgaagagtatttcatcgaaggtacgcagccgacacaacaggcagtgcacgaggtgggaacgaccattatcgataatggcgaggcacaggaattgttctgattaaaaaggcgcttcggcgccttttcagtttgctgacaaagtgcacttgtttatgccggatacggcgtgaacgcgttatccggctaacaaaatcgtgaaaactcaataaattgcagaaaccccataagcctgataaacattgtgcatcaggcaaacttcacgcatttacactcgcccctgccctttcaaccattcgcgcacgaggaacagcgcactgacattgcgcgcttcattgaagtcagggtcttccagccaatccatcatatgcgccagcggccagcgcacctgtggtagcggctctggctcatcgccttccagactttccgggtagagatcttgcgctaccacgatattcattttgctggaaaagtaagacggtgccatgctgagcttcttcaaaaaagtcagatcgttcgctccaaatccaacctcttcttttagctcgcggttagcggcttcgtagacgctttcacccggatcaattaatcctttgctaaaacctaattcgtaggattcagttcccactgcgtattcgcggatcaggatcaggtgatcgtccacaatcggcacaatcatcactgcttcccggttggttggacgcattcgttcataaacacgccgcacgccattgctgaactccagatccacgctctcgacggtaaacagtcgggaacgggctacagtttcaacattcagaatggtgggtttttgtaaacttttgctcatcgtgggatctatgctgtgaaatcagcggttattgtgcgatatcggacacgctttcggcaatgtgaattgcatgttatttacatttatgtaacttaataaataatcgtcctcaaatcaaattaaaagtcaataggttgaaataactccaggaatttgctgatattccgccttcagagggtttgctatgatcagcggttactgtgatgtgcttaatgatgctcaagttaaactccacgcttgccgatagccaaccgcagaatcatgtattgtgtccggtgcgactgaccacgcctgacagactaagtaagatggggaaagcatgagcaccattgtgatttttttagctgctttgctggcctgcagtctacttgcgggatggctgataaaagtgcgatccagacggcgtcagctgccctggaccaacgccttcgcggatgcgcaaacgcgtaaactcacacctgaagaacgtagcgccgttgaaaattatcttgagagcctgacgcaggtattacaggtgcctggcccaacgggagccagcgcggcaccgatctctctggcgctgaatgccgaaagcaacaacgtcatgatgctgacacacgctatcacgcgttacggcatctctaccgacgatccgaataaatggcgttactacctcgatagcgtagaagtccacctgccccctttctgggaacagtacatcaacgatgagaataccgttgaactgattcataccgatagcctgccgctggttattagtctcaacggtcatacgctgcaggagtacatgcaggaaactcgcagctatgccttgcaacctgttccgagtacgcaggcgagcattcgcggggaagagagtgagcaaatcgagctactcaatattcgcaaagaaacgcatgaagaatatgcgctgagtcgtccgcgcgggctgcgtgaagcgttgctgatcgtcgcctccttcctgatgttctttttctgcctgattaccccggatgtatttgttccgtggctggcaggcggcgcgttactgctgctgggcgcaggtctgtgggggctattcgcgcccccggcaaaatcctccctgcgggaaattcattgtctgcgcggtacaccccgtcgttggggattgtttggcgaaaacgatcaggaacagatcaacaatattagtctcggtattatcgacctggtctatcccgcacactggcagccatacattgctcaggatctcggtcaacaaaccgatatcgatatctatctcgaccgccatgtagtgcgtcagggacgatatcttagcctgcatgatgaagtaaaaaactttccgttacagcactggctgcgcagtacgattatcgctgcgggcagcctgctggtgctgtttatgctgttattctggatcccgctggatatgccgctgaaattcactctcagttggatgaaaggcgcgcagaccattgaagccactagcgtaaaacaactggctgacgctggcgtgcgggtaggcgatacattgcgtattagcggtacgggaatgtgtaatattcgaacttccggaacctggagcgcgaaaaccaatagtccttttttaccgtttgactgcagccagatcatctggaacgacgcccgcagtttgccattaccagaatctgaactggtcaacaaagcgacggcattgactgaagcagttaatcgccagctgcaccctaaaccggaagatgaatctcgcgtcagtgccagtttacgtagtgcaattcaaaaatccggcatggtattgcttgatgattttggcgacattgtactgaagacagcggatttatgttctgccaaagatgactgtgtgcgactgaaaaatgcgctggtcaatctcggcaacagtaaagactgggacgcgctggtaaaacgcgccaacgccgggaagctcgatggcgtgaatgtgttattacgcccggtgagtgcggaaagcctggataacctggtggcaacctccaccgcgccgtttatcacgcatgaaacggcgcgagcggcacaaagtctaaacagtccggcccccggcggattcctgattgtcagcgacgaaggcagcgattttgttgatcagccctggcctagcgcaagtctttacgactacccgccgcaagaacagtggaacgctttccagaaactggcacaaatgctgatgcatacgccgtttaacgccgagggtatcgtcacaaaaatcttcactgacgccaatggtacgcagcatattggccttcatccgatcccggatcgttccggcctgtggcgctatctcagcaccacattgctgctactgacgatgctgggtagcgccatttacaatggcgtacaggcctggcgtcgttaccagcgtcatcgcactcgcatgatggagattcaggcctattatgaaagctgcctgaacccgcaactgatcacccctagtgaaagccttatcgaataacacgtttgcgcggcaggttatgctaccctgtcgcgcaaattgcttcactctggagatttccctcatgcatatcaacattgcctggcaggacgtagataccgttctgctggatatggacggcacgttgctcgacctcgccttcgataactatttctggcaaaagctggtgcctgaaacatggggcgcgaaaacggggttacgccacaggaagcgatggaatatatgcgccagcaatatcacgacgtacagcatacgctaaactggtactgtcttgattactggagtgagcaactgggtctggatatctgtgcgatgaccaccgagatgggaccgcgtgccgtactgcgtgaagataccattccgtttcttgaggcactgaaagccagcggtaagcagcgaattttgctcaccaatgcgcatccgcacaacctggcggtaaaacttgagcataccggtctggacgcacaccttgatttattactttccacccacacatttggttatccgaaagaggatcagcggttatggcatgcggtggccgaagctacgggtctgaaagctgaaagaacgctgtttattgatgacagcgaagcgattctcgatgctgccgcgcaatttggtattcgttactgcctcggcgtgactaatcctgattccgggattgccgagaaacagtatcaacgccatccgagtctgaatgactaccgccgcctgatccccagcctaatgtgaaggagacgccatgaaagagaaacctgctgttgaggttcgactggataaatggctatgggctgcccgtttttataaaacccgcgcgctggcccgtgaaatgattgaaggcggtaaggtgcattacaacgggcagcgcagcaagccgagcaaaatcgtcgagctgaatgccacgctcactctgcgccagggaaatgacgaacgcacggtgattgtaaaggcgattactgaacagcgtcgccccgccagcgaggcagccttgctgtatgaagagactgcggaaagtgtagagaaacgcgaaaaaatggcgctggcacgtaaacttaatgccttaaccatgccgcacccggaccgacgcccggacaaaaaagagcgccgcgacctgttacgatttaaacacggcgacagtgaataactgtcacctgcaagagagatgattatgccgcaacatgaccaattacatcgctatctgtttgaaaactttgccgtgcgcggcgaactggtaaccgttagcgaaaccctgcaacagatccttgagaaccacgattatccgcagcccgttaaaaacgtgctggcagaactgctggttgcgaccagcctgttaaccgctacgctgaagtttgatggtgatatcaccgtacagctgcagggcgacggtccgatgaatctggcggttattaacggtaacaataaccagcagatgcgcggtgtggcgcgcgtgcagggcgaaattccagaaaatgccgacctgaaaacgctggtcggcaatggttacgtggtgatcaccattaccccgagcgaaggcgaacgctatcagggcgtagttggtctggaaggtgataccctggcggcctgcctggaagattactttatgcgttctgaacagctgccgacgcgcctgtttattcgcaccggcgacgtagacggcaaaccggctgcaggcggtatgttgttgcaggtaatgcctgcgcaaaatgcccagcaggacgactttgaccacctggcgacgctaaccgaaaccatcaaaaccgaagaactgctgaccttaccggcaaacgaagtgttgtggcgtttgtatcacgaagaagaggtgacggtttacgatccgcaggatgtggagttcaaatgcacctgcagccgtgaacgttgcgccgatgcgctgaaaacgctgcctgatgaagaagttgatagcatcctggcggaagatggcgaaattgacatgcattgtgattactgcggtaaccactatctgttcaatgcgatggatattgctgaaatccgcaacaacgcgtctccggcagatccgcaagttcattaatgagtatgtccggcagagagggctctgccggattttacgactaatacacctgatgcgctttgtcactcattcagattcacattcagcctttcaccatccactacaagatcgcgccacgctttaggcttcgtccccagttttccatccttcgcagctgtgagtaatttttctttcgttatttcgttcggaagtaaactcatatcaagcgcgtcccattcttttctgtcactgtcaaagccatagacaatgactctgtcatcattaaaagcaaacaggatccgctccgcctgaccatcactattcagatcttgctcgaccaggacgcaggcgtctttttcaatacaggtcatcacgttatagcgatcctggattaaggcgctccagaatgtcgcatcaggtttaacagaaccaggggcaattaacacattatcggctaatactttttcgcttacctgttgctgaagatgttgctctccatctaacgccatcagcagatcccgcgcgcgtttcgggtctttcataaacccggcatcgcttttcaggctctcaagcgcagcacgtccatagcgaccgctctgctcgagcatgtagatagttacctggtcactcgtgtttttgccgctctgataacgcgccatatggctgttcacgctaatgcgcatactgtccagcaccgggctattaagaagcaccagtatcaccaacaccaataagctaaccgcaaggttcactttgccctgaagaacaacgggattttgccctttacgccagacgatgctgacaaaataccccaggctccacaccagtaacaccagcaccgccagcacgccctgcaagcggtcgacagtccagccgtactgagcgacccgcagccataacgcccaggcggcgacgaacacatacagcggagcaaccagcaaagcggttttaatcaggcaacgcaacggccctgtccagggaagactcgctttttgcggatcgcggacaatagccattaagatcaattgcaaaaaggccagcgtcaacagcaacccggcggcggagatgtggcgagaaatcgcgctcaggcccgtaaacggcagggtgatgataaacatcagggttagcaaacttactaacggcagcaaccccgtggcgattaacgtgaacaacttttgaatagagtcgattaaacgactctgtgttcgcgcgaggatcaccgccagcgcggtaaccagacctaacgtgagataaataaaccagtcggttgcaaaaaagagcgtattgaaaaacgtgatgccaacaagtttaaacaactcactccacagtaaaagcaccagccacgtcaagccattggcgagaaaaatcaccagtaatataagtacgttatgccatacactctggtaaaaatagcgatagcggctactgtcattgcggatgcgaaggctttgttgtatccacggtagcaacaacattgccatcaacagcagatagcaaccaaaatcccaaagcgccttttcagctctccaggggttcatgccatcagtttgccacttcagccagccgctcatccccagcgtggcaataaacactagcgccagccatccccaaaggcgcttctgtttaaaagagatcacggagaagagtaaaacggaactaaacgcgacggtcgcaggcacgccataaacaatccaactgtgattttttccggaaagccaggcgatcagcaggtagcaaaccagaccctgaagtaatccggtagcaatcatcccccagcgtgttgcgggactaagttcaacgttatccatgttggttatccagaatcaaaaggtgggttaattatcgcatccgggcagtagtattttgcttttttcagaaaataatcaaaaaaagttagcgtggtgaatcgatactttaccggttgaatttgcatcaatttcattcaggaatgcgattccactcacaatattcccgccatataaaccaagatttaaccttttgagaacattttccacacctaaaatgctatttctgcgataatagcaaccgtttcgtgacaggaatcacggagttttttgtcaaatatgaatttctccagatacgtaaatctatgagccttgtcgcggttaacacccccaaaaagactttactattcaggcaatacatattggctaaggagcagtgaaatgcgcgttaacaatggtttgaccccgcaagaactcgaggcttatggtatcagtgacgtacatgatatcgtttacaacccaagctacgacctgctgtatcaggaagagctcgatccgagcctgacaggttatgagcgcggggtgttaactaatctgggtgccgttgccgtcgataccgggatcttcaccggtcgtagtccaaaagataagtatatcgtccgtgacgataccactcgcgatactttctggtgggcagacaaaggcaaaggtaagaacgacaacaaacctctctctccggaaacctggcagcatctgaaaggcctggtgaccaggcagctttccggcaaacgtctgttcgttgtcgacgctttctgtggtgcgaacccggatactcgtctttccgtccgtttcatcaccgaagtggcctggcaggcgcattttgtcaaaaacatgtttattcgcccgagcgatgaagaactggcaggtttcaaaccagactttatcgttatgaacggcgcgaagtgcactaacccgcagtggaaagaacagggtctcaactccgaaaacttcgtggcgtttaacctgaccgagcgcatgcagctgattggcggcacctggtacggcggcgaaatgaagaaagggatgttcagcatgatgaactacctgctgccgctgaaaggtatcgcttctatgcactgctccgccaacgttggtgagaaaggcgatgttgcggtgttcttcggcctttccggcaccggtaaaaccaccctttccaccgacccgaaacgtcgcctgattggcgatgacgaacacggctgggacgatgacggcgtgtttaacttcgaaggcggctgctacgcaaaaactatcaagctgagcaaagaagcggaacctgaaatctacaacgctatccgtcgtgatgcgttgctggaaaacgtcaccgtgcgtgaagatggcactatcgactttgatgatggtagtaaaaccgagaacacccgcgtttcttatccgatctatcacatcgataacattgttaagccggtttccaaagcgggccacgcgactaaggttatcttcctgactgctgatgctttcggcgtgttgccgccggtttctcgcctgactgccgatcaaacccagtatcacttcctctctggcttcaccgccaaactggccggtactgagcgtggcatcaccgaaccgacgccaaccttctccgcttgcttcggcgcggcattcctgagcctgcacccgactcagtacgcagaagtgctggtgaaacgtatgcaggcggcgggcgcgcaggcttatctggttaacactggctggaacggcactggcaaacgtatcagcattaaagatacccgcgccattatcgacgccatcctcaacggtagcctggataatgcagaaaccttcactctgccgatgtttaacctggcgatcccaaccgaactgccgggcgtagacacgaagattctcgatccgcgtaacacctacgcttctccggaacagtggcaggaaaaagccgaaaccctggcgaaactgtttatcgacaacttcgataaatacaccgacacccctgcgggtgccgcgctggtagcggctggtccgaaactgtaatgatttgaagctggagaatatctatccagtatcttatagaaagcaaaacgggaggcaccttcgcctcccgtttatttacccttcttttgtcgtgccctgcgcccgcgttaccggcactggcagccaggcgcgaatggaaagcccgccccgctcgctggtgccaagctccagcatcccgttatggttatccacgatacgctgcacaattgccagccctaatcccgtgccgctaatggtgcgcgcactgtcgccgcggacaaacggctggaacaggtgcttacgttgttccggcgcaattcccggaccgtcatcttccacctggaaccaggcgcgattcggctccgttccgctgctgactttgatccagccattgccataacgggcggcgttgaccaccatattcgccaccgcgcgtttgatgctcagcgggtgcattttcacttcaatgctgccggggtaaagcgcggtttcaatttcccgctcatagccactttcggcagcaatcacctcaccgagtactgcattaagatccgccatttccatcggcatctcctgcccggtgcgcaggtagtcgataaactgctcaatgatggcgttgcactcttcgatatctttattgatgctttctgccagatagccatcctgctcgctcatcatctcagtcgccaggcgaatacgcgtcagcggcgtgcgcaagtcgtgacttacccccgccatcagcagcgtgcggtcatccgccagttgcttaacaccagccgccatatggttaaaggcacgggtaacggaacgcacctcgctagcgccatactcacgcagcggcggcggaataatccctttaccaacctgcaaggctgcgtgttcgagatcgaccaacggtcggttctggatacgaataaacagccacgccccgcctatcgccaatagcataatcgccagcgtatagcggaacagcggagagaaatcgccctgatgaatttcggtcagcggcacgcgtacccagatattggggctcagccaggttttcagccagacgacagggctacttttgttgacctcaacgcgcacttccgtcgggccgcccagttgctgcgccatctgatggcttaagaattcatagtgttgcgcccaacgcagacctgcctcttcggcagcctcgttggagtagagagagatccccagctcacggtagatctcccgacggaaagcgggaggcacaaccaactgcgtgccgtcctccagttgcagtttgtcggtcatcaacatacgcacttcgtacgcgaggactttattaaactgctggaggctcggcaaaatcgcgaagttcagcaccaccagataagtcgtcaccaggctggcgaacagcaaggtgacgatgagcaataacgtacgggcaaaactacttcgtgggctgaagcgcaatcgcctcatgctttagagccgtccggtacaaagacgtagcccagaccccagacggtctgaatgtaacgcggatgcgctggatcttcttccaccatgcggcgcagacggctaatctgcacgtcgatggagcgttccattgcggaatattcacgaccacgggcaaggttcatcagcttatcgcgggagagcggctcacgcggatggctgaccagtgccttcagtaccgcaaactcaccgctggtgagcggcatcggctcgtcttcgcggaacatttcgcgcgtaccgaggttaagtttgaacttaccgaaagcaattaccgcctcttcctgactcggtgcgcctggcagttcgttcgcctgacgacgcagcaccgcacggatacgggccagcagttcacgcgggttaaacggttttggaatgtagtcgtcagcgccaatctccaggcctacgatacggtccacttcttcccctttcgccgtcaccataatgatcggcatcgggttgctctgactacgaagacgtcggcaaatgctcaagccatcttcaccaggtaacattaaatccagtaccataagatggaaagattcacgagtcagcaggcgatccatctgttctgcattagcgacgcttcgaacctggaagccttgttcggtgagataacgttccagcagcgcacgcaggcgcatgtcgtcatcgaccaccagaatcttgtagttctcttgcattgtttgtactcccaaaggttcgcaacaatttgtaagcgtgtattcttaaaaaagctcacgttcgtcaccagctaaatctggtatgaatttcagcctaaattgttacaaagcatattaaacagcagcttaagtatacaatttattcggcgaaacattattgattctgttgatatgatcacgttatacccaatgtgcgcattatcaaacagacaaagggaatcaacgagatgaaaacgcccctggttacccgggaagggtatgaaaaactcaaacaagagcttaattatctctggcgtgaagaacgcccggaggtcacaaaaaaggtgacctgggccgcaagtctgggcgaccgcagcgaaaatgctgactatcagtataataaaaagcgtctgcgtgaaatcgaccgtcgcgtgcgctatctcactaaatgcctggaaaatctcaaaatcgtcgattactcccctcagcaggaaggcaaagtcttttttggcgcgtgggtggagattgaaaacgacgatggcgtgactcaccgtttccgtattgtcggctacgatgaaatttttggccgtaaagattacatctctatcgattccccgatggcccgcgcattgctgaaaaaagaagtcggcgatctggcggtggtgaatacccctgccggggaagcgagctggtatgttaatgctatcgagtacgtgaaaccgtaaggaagagtcttaacctcctgccgatggctggcatttttgccagccagtccgtataactatcccctgatttttgatccgaaaagatgaactcaaaccatgatgaatgatagcttctgccgcattattgcgggtgaaattcaggcgcgcccggaacaggttgacgctgccgttcgcctgcttgacgaagggaataccgtgccgtttatcgcacgttatcgtaaggaaatcaccggcggtctggatgacacgcagctgcgtaatctggaaacgcgtctgagctatctgcgcgagctggaagagagacgtcaggcgatcctcaagtccatttccgagcaaggcaaactcaccgatgatctggcgaaggccatcaacgccaccctaagcaaaaccgaactcgaagacctctacctgccctacaaacctaaacgccgcacccgcgggcaaatcgccattgaagcagggcttgagccgttggctgacctgctgtggagcgatccgagtcacacgccagaagtcgccgctgcacaatatgtttatgccgataaaggcgtggcagataccaaagccgcgctggatggcgcgcgctatatcctgatggaacggtttgccgaagatgccgcgctgctggcgaaagtgcgtgattatctgtggaagaacgcgcatttggtttctacggtggtgagcggtaaagaagaggaaggggcgaaattccgcgactatttcgatcatcacgaaccgttgtccacggtgccttctcaccgcgcgctggcgatgttccgtgggcgtaacgaaggcgtacttcagcttagcctgaatgccgatccacagttcgatgagccgcccaaagagagctattgcgagcaaatcatcatggatcaccttggcctgcgcctgaacaatgccccggcggatagctggcgcaaaggcgtggtgagctggacgtggcgcatcaaggtgctgatgcatctggaaaccgaactgatgggcaccgtgcgcgaacgtgcggaagatgaagcaatcaacgtctttgcccgtaacctgcacgatctgctgatggcggcccctgccggactgcgtgcaacgatgggcctcgatccgggtctgcgtactggggtaaaagtggcggtggtcgatgccactggcaaactggtggcgaccgacaccatttacccgcacaccggacaggccgcaaaagcagcgatgaccgttgctgcgctgtgtgaaaaacataacgttgaactggtagcgatcggtaacggtacagcttcccgcgaaactgagcgtttctatctcgatgtgcagaagcagttcccgaaagtgaccgcgcagaaagtaatcgtcagcgaagcaggcgcgagcgtttacagcgcttccgagctggctgcacaggagttcccggatctcgacgttagcctgcgtggcgcggtgtctatcgcccgccgtttgcaggatccgctggcggagctggtgaaaatcgatccgaaatctatcggcgtaggtcagtatcagcatgacgtcagccagacgcaactggcccgcaaactggacgcagtagtagaagactgcgtaaacgccgttggcgtcgatctcaacactgcttctgttccgctgttaacccgcgtggcgggcctgacgcgcatgatggcgcaaaacatcgttgcctggcgcgatgagaacggtcagttccagaaccgtcagcaactgttaaaagtgagccgtctggggccgaaagccttcgagcagtgcgcgggcttcttgcgcattaaccacggtgataacccgctggacgcgtctaccgttcacccggaagcctatccggtggtggaacgcattctggcagcaacacagcaggcactgaaagatctgatgggtaacagcagcgaactgcgtaacctgaaagcgtctgactttactgatgagaaattcggtgtgccgacggtaaccgacatcatcaaagagctggaaaaaccgggtcgcgatccgcgtccggaatttaaaaccgctcagtttgccgatggcgtcgagacaatgaacgacctgcaaccgggtatgatcctcgaaggcgcagtgaccaacgtcaccaactttggcgcgtttgtcgatattggcgtgcatcaggacggcctggttcacatctctagtttgagcaacaagtttgtggaagatccgcataccgtggtgaaagcgggcgacattgtgaaggtgaaagtgctggaagtggatcttcagcgtaaacgtatcgccctgactatgcgcctggatgagcagcctggcgaaaccaacgctcgtcgcggcggcggtaatgaacgcccgcaaaacaaccgcccggcagccaaaccacgcggtcgtgaagcgcagcctgccggtaatagcgcgatgatggatgcgctggcggcggcaatgggcaaaaaacgttaaacgcccgtactggcctacggttcgaatttgcacgaaatcgtagggcagataaggcgttcacgccgcatctggcaacgaacgccttgcctgacataaaagtgccggagaatatctccggcatttttattccacagccaaactcataatatattccggcaatatttatcatttcattaacaactgaaaccttaattaaacattagccagtccgggtaattcactattcgaattatattttcgctgcgatataaccttgagccacatcaacattgagtcagattattattcaaaccaacattcgcacacattttaagtattgctgatagaaaccattctcattatcattgtgttgttgattatttaatctctcctttgttggcaaatcatctggtctcatgtcgctgtcaaacgccccatgaggtagttatccagttaatgagaaacaagtaggcacctatgcaatacactccagatactgcgtggaaaatcactggcttttcccgtgaaatcagcccggcatatcgccaaaaactgctttctcttggcatgttacctggctcctcttttaatgtggtgcgcgtcgctccactcggcgaccccattcatatcgaaacccgtcgtgtgagcctggtattacgcaaaaaagatctggccttattagaagtggaagcggtttcctgttaatacggtgataacaacaatgaaaaaattaaccattggcttaattggtaatccaaattctggcaagacaacgttatttaaccagctcactggcagtcgtcagcgtgtaggtaactgggctggcgttaccgtcgaacgtaaagaagggcaattctccaccaccgatcatcaggtcacgctggtggacctgcccggcacctattctctgaccaccatcagtagccagaccagcctcgatgagcaaatcgcctgtcactacattttgagtggcgacgccgacctgctgattaacgtggtggatgcgtctaaccttgagcgtaacctgtacctgacgctacaactgctggaactcggcattccctgcattgtggcactgaacatgctcgacattgccgagaagcaaaatattcgtattgaaattgatgctctgagcgcgcgtctgggctgtccggtgatcccgctggttagtacccgtggtcgcggtattgaagcgctcaagctggcgattgatcgctataaagctaacgagaatgtggaactggtgcattacgcacagccgctgctcaacgaagcagatagtctggcaaaagtgatgccttccgacatcccgctgaaacaacgtcgctggctgggcctgcaaatgctggaaggcgatatctacagccgcgcctacgccggtgaagcgagccagcatctggatgccgccctcgcccgtctgcgtaatgagatggacgatccggcgctgcacattgccgatgcgcgttaccagtgcattgctgccatctgtgatgtggtaagcaacaccctgacggcagaacccagccgtttcaccactgcggtagataaaatcgtgctcaaccgtttcctcggtctgccgattttcctctttgtgatgtacctgatgttcctgctggctatcaacatcggcggggcgttacagccgctgtttgacgtcggctccgtggcgctatttgtgcatggtattcaatggattggctacacgctccacttcccggactggctgactatcttcctcgcccagggcctgggtggcggcattaacaccgtgctgccactggtgccgcagattggcatgatgtacctgttcctctccttccttgaggactccgggtatatggcgcgtgcggcgtttgtgatggaccgtctgatgcaggcgctgggcttgccggggaaatcctttgtgccgctgatcgtcggtttcggttgtaacgtaccgagcgtaatgggtgcacgtacgcttgatgcaccgcgtgaacgtctgatgaccatcatgatggcaccgtttatgtcctgcggcgcgcgtctggctatcttcgcagtattcgcggctgccttcttcgggcagaacggtgcgctggcggtcttcagcctgtatatgctgggtattgtgatggcggtgctgactggcctgatgctcaagtacaccatcatgcgcggtgaagcgacgccgtttgtcatggagttgccggtctatcatgtaccacacgttaaaagcctgattatccagacctggcagcgtctgaaaggcttcgttctgcgtgctggtaaagtgatcatcatcgtcagcattttcctgagcgctttcaacagcttcagcctgagcgggaaaatcgtcgataacatcaacgacagcgcgctggcgtccgtcagccgggtgatcaccccggtcttcaagccaattggcgtgcatgaagataactggcaggcaacggttggcctgtttacaggtgccatggcgaaagaagtggtagtgggtacgctcaacaccctctacaccgcagaaaatattcaggacgaagagttcaatccggcagaatttaacctcggtgaagagctgttcagtgcgatagatgaaacctggcagagcctgaaagacaccttcagccttagcgtactgatgaaccccattgaagccagcaaaggcgacggcgaaatgggtaccggggcgatgggcgtgatggatcagaaattcggtagcgcagcagcagcttacagctacctgattttcgtcctgctgtatgtaccatgtatcagcgtgatgggggctatcgcccgtgaaagtagccgtggctggatgggcttctccatcctgtgggggctgaatatcgcttacagtctggcaacattgttctatcaggtcgccagctacagtcagcatccaacttacagcctggtgtgcattctggcggttatcctgtttaacatcgtggttatcggtctgctgcgccgcgcgcgtagccgggtggatatcgaactactggcaacccgcaagagcgtaagcagttgctgcgcagccagcaccaccggtgattgccattaatggctagtcttattcaggtgcgcgatttgctggcgttacggggccgtatggaagcggcccagataagccagacattgaacactccacagccaatgattaacgccatgctgcaacaactggaaagtatgggcaaagccgtgcggattcaggaagaacctgacggctgcctctctggcagttgtaaaagctgcccggaaggaaaagcctgtctgcgcgagtggtgggcgctgcgttaaccttactccatcgcctgttttggaaagcccggtatgcgtctgcatccgggcttttttgcgtgcggctttccataaaaatgcaactcttgcagcacggcgtaagttcctttgaaagcatctcgcagggatgaaaactcgctaatacacaggtgtggagtggcgcgtagagtcgcggcattcaaacaacaggtgaaggaacgccatgagcaaaaagcagagttccaccccacacgatgcgctgttcaaactctttttacgccaaccggacacggctcgtgattttcttgcgtttcatttaccggcacccattcacgcgctttgtgatatgaaaaccctcaagctggagagcagcagctttattgatgacgatctgcgtgaaagctattccgatgtgctgtggagcgtgaaaacggaacaaggaccaggatacatctattgtctgattgaacatcaaagcaccagtaacaaactgatcgcatttcgcatgatgcgttacgctattgccgcaatgcaaaatcaccttgatgctggatacaaaacgttgccgatggtggtgccattgttgttttaccacggtattgaaagcccctatccctatagcctgtgttggctggattgtttcgccgatcccaaactggcaaggcagctttatgcctccgcatttccgctgattgatgtcaccgtcatgcctgatgatgaaatcatgcagcaccgacgtatggcgctgctggagttaattcaaaaacatattcgtcaacgcgacctgatggggctggtagagcaaatggcctgcttattaagtagtggatacgctaatgacagacaaatcaaagggctgtttaattacatactgcaaactggcgacgctgtacgttttaacgattttatcgacggcgttgccgaacgtagtccgaaacacaaggagagtttaatgactattgcggaaagattgcggcaggagggggaacaatccaaagccctgcatatagccaaaataatgcttgaatccggagttcctcttgcagacatcatgcgctttaccgggctgagtgaagaagagttggctgcggcgagtcagtaaagttctgtctcgccatttcaaaagccacttacaccctctgcttcaacgccaccagcaggtgacaaaactcggccggatggctaataaatggcgcatgggccgctttggcgaagatataactttcgctgtgaggccaaagtttatccagcatcggcaccactttgcgcggcaccagaccgtcgagatagccatacaatcgcaaaaacggcatggacacgttttgcagcggctgacggagatcgaccgttttcaggatttccagcccgccattaagcacgtcaacctccggcatcggtaacgccagaacggttttcttcaacgcccgcgcatcctggcgcgccgtttcagtccccatggtttgtaacgccaggaaccgctccactgtacgctgaaaatcatcactgagttgctgctgaaatcccgccagcacgtccggttttatccccggccactcgtcacgagcactaaaacaaggactgctcgccacggtgaccagcgcctgaacacgctcgggatgggttaacgcaatctggcttgccaccagcccgcccagactccagcctaaccaaatggctttatcaggtgcctgttgcagcacggcttcggccatatcagcaagactcagcgcaccaaatccccggctacgcccgaagccgggcaggtcaacaaggtgcagcgtaaaatggctgctaagttcctcgtcaatgcaacgccacacttcggcattcagtccccatccgtgcagcagcacaagatgaacattcccctgacctttggtctgccaccagatgttattcatccgctattgttctcttttgacttacaaggatgaacatatgctaacagtaccgggattatgctggctatgccgaatgccactggcgttaggtcattgggggatttgtagcgtctgtagtcgcgccacccgcacagataaaacgttatgcccacaatgtggattacccgccacacactcccatcttccctgcggtcgctgcctgcaaaaaccgccgccctggcaaagactggtcacggttgccgactatgcgccgccgttaagtccgcttatccaccagcttaaattttcccggcgcagtgaaatcgccagcgccctgagtcgtctgttactattggaagtcttacacgctcgtcgcaccaccgggttgcaattgccggatcgcatcgtcagcgttccgttatggcagcggcgtcactggcgtcggggatttaatcagagcgatttgctgtgtcagccgttaagtcgctggttgcactgccaatgggatagcgaagccgtcacacgtacacgggccactgcgacccagcattttctcagtgcccggctgcgcaagcgcaacctgaaaaatgcctttcgtcttgaattgcccgtgcaaggtcgccatatggtgattgtggatgatgtcgttaccaccggaagtaccgtcgcagagattgcgcagttgcttttacgcaatggtgcggcggctgtccaggtctggtgcctttgtcgaaccttgtaaagcctcgatgatgggcgtattataaccaactaaaatagtcaactattaggccattactatgatccgtatttccgatgctgcacaagcgcactttgccaaactgctggcaaatcaggaagaagggacacaaatccgcgtatttgtgattaaccctggcacgcctaacgctgaatgtggcgtttcttattgtccgccggacgctgtggaagccaccgacacagccctgaaatttgacctgctgaccgcgtatgttgatgagttaagcgcaccatacctggaagatgcagagatcgattttgttaccgaccagttgggttcccagttaacgctgaaagccccgaacgccaaaatgcgtaaagtggcagacgatgcaccgctgatggagcgcgtggagtatatgctgcagagccagatcaacccacagcttgctggtcacggtggtcgcgttagcctgatggaaatcaccgaagacggttacgccattctgcaatttggcggtggctgtaacggttgttccatggtcgatgtgacgctgaaagaagggatcgagaagcagctgctgaacgaattcccggagctgaaaggtgtgcgcgatctcaccgaacaccagcgcggcgaacactcctactactaagttatcccctcttttgtagattgcccgatgcgacgctaaagcgtcatttcgggcctacgttgaacatgtgccagacgttggcgcagcattgctttgtcaaatcctcggttcgtttccccgcgataatatgaccaacctctcataatttaaatttaccccgctctggtgattctcaaacgccagatgttacccgtatcattcacatgggtaccaaacatactcctgacatctgactacaataattagttttagtgggtatcagtcgtggtgccgcaatatctctgttcccgattgggataattagagtttgtcgtcagaaaattgacgttacccataacaaatgaaaggccaggtaaatcatgccattagtcattgttgctatcggtgtaatcttgttgttgctcctgatgatccgcttcaaaatgaacggcttcatcgctctcgtcctcgtggcgcttgctgttggattaatgcaaggaatgccgctggataaagttattggctccatcaaagccggtgtcggcgggacgctcggtagccttgccctgatcatgggttttggcgcaatgctgggcaaaatgctggcagactgcggtggcgcacaacgtatcgccaccacgctgattgccaaatttggtaaaaaacacatccagtgggcggtggtactgaccggttttaccgttggttttgccctgttctatgaagtgggctttgtgctgatgctgccgctggtgtttaccatcgcggcttctgcgaatattccactgctgtatgttggtgtaccaatggcggctgcactgtctgtgacccacggcttcctgccaccgcatccgggtccgactgcgattgccaccattttcaatgccgatatgggtaaaaccctgctgtacggtactattctggcaatcccgaccgtgattctcgccggtccggtttacgctcgcgtgttgaaaggtatcgataagccaattccggaaggtctctacagcgcgaaaaccttcagcgaagaagagatgccgagctttggcgtcagcgtctggacctctctggtgccggtagtactgatggcgatgcgtgcgattgccgaaatgatcctgccgaaaggtcacgctttcctgccggtagcggagttcctcggtgacccggtaatggcaacgctgattgccgtgctgattgcgatgttcacctttggtctaaaccgtggtcgtagtatggatcagattaacgacacgctggtttcttccatcaaaatcattgcgatgatgctgttgatcatcggtggtggcggtgcgttcaagcaggtgctggtagacagcggcgtggacaaatacattgcttccatgatgcacgaaaccaacatttctccgctgctgatggcctggagcattgctgccgtactgcgtatcgcgctgggttccgcaaccgttgcggcaatcactgcgggtggtatcgcggcaccgctgattgcaacgacgggtgttagcccggagctgatggttattgcggttggttccggtagtgtgattttctctcatgtgaacgatccgggcttctggctgttcaaagagtactttaacctgactatcggcgagaccatcaaatcctggagcatgctggaaaccattatcagcgtgtgcggtctggtaggctgtctgctgctgaatatggtgatttgataacactgactgccggatgcggcgtgaccgccttatccggcctacgattcgggatgaattagtaggccggataagacgcgtcaagcatcgcatccggcatcaaccgcactttacttcttcttcgctgcagctctgcgccgtctgtccaaatccttcagcaacttgttcacgccatcatcggcaaacatgctctcaagcgttgcggaaagcttgcgtcgccagtttttatactggtaactggtgccaggaatattcaccggttcggccatatccagccagtcttccggctgtagtcctaacagagcactgttactgtcggcaatgtagcgctgcaaaccacggttcagcgtcggcgtcatgctcatcaagcttgccttatgcccggcacgtttcggcagacaaccatatttatgcagtgcatccagcagcccttgcttcgccagttcgcgatcctgatacagaccgcgcagtaccacttcatccggatacagccccagggttttgcccagcgttagatccccgcactcccagtaaccgcgcagcgttggcaggtcatgtgtcgccgcaaccgccatgctctgctccggatacgctttcggtgcacggaacgtcttctcgtggtcgttttcgaaatagagcactttgtaagagtacacaccgctgctgcgcagcttaccgacaatctctaccggtacggtaccgagatcttcaccaatcaccatacagcgatgacgtttactttcgagtgccagaatgctgagcagatcatccaccggatagtgaacatacgcgccctgatctgccgtctcgccatacggtatccaccacaaacgcagcatgctcatcacatggtcaattcgtaatgcgccgcagttttgcatattggcacgcaacagctcgataaacggttcataggcacgcgcggtgatgatatgcgggtccattggcggtaatccccagttctgccccaacgggccgaggatatccggcggcgcgccaacgcttgctttcaggcaatatagttcacggtcacaccaggtttccgccccaccttccgctacgccaaccgccagatcacgatacaagccaatcggcatttcatagccctggcttatctcccagcaggcggcaaactggctgtaagccagccactgcaaccagagataaaaatcgacgtcatcacgatgttcttcgcagaactgacgcacttctggactatccacgttctgatacatctctggccatgcaggccagccccagcgcatttcgtcctctttcacttgctgggcatgtagcgcatcaaaggctgcctgccagaacaggctgtcgccctgctctgcaacaaactggcgaaacgcggccatctgctcatcatcacgttgcgcgaaacctttccacgccattcgtaatgctgtcatttttagggcggtaaccgtggagtaatcgacccagtcggcatcgcgcgcctgttgcagcgtctgttgcgtggtcggcaactgccaccaggcctgagcctcttcgctaagatggaaatcttcaacggcgttaacgtcgatataaatcacattcagccaacggcgagaagacgggctgtatgggctggcgctctccggatttgccggatagagcgcatgaatcgggttcaggccaatgaagctcccgccacgttttgccacatccaccagcatcgctttgagatcgccaaaatccccaataccccagtttttttcgcttcgcagcgtataaagctgaacgcaggcaccccacagcttttgtttattcagcaacgcctgcggttcgtaacagcgtttcggggcgacaatcacccggcaatgcgcgcgctggtcgtcctgggtgagtgtcagcgtgtgataaccttccggcagcttcgtcggtagattgaacgctttgccccccgttacatggcctttgtactgcgttccttcttcggtggtcagcagccagctatattcgccgctgccctccaccaccatcggcatttttttgccgctggtataaaccatgacattcgggactggcgttaccgccactttcgtggcggtacgttgatgcatcgcgtcaagcaaacgccgtttggtttcggcgctaatgctctgcggtttaccgtgggcattgatgtaattggggctaatccccgccgccagcgcggcattatccagacgtttgctttccatcgagcttccttagcgttttgcctgccagatacgagcctgataatcgcgaatagagcgatcgctgctaaacataccgcagcgggcggtattgaggatcgccgcgcgagtccaggcctcctggtcgcggtacagcacatccacctgcttttgtgcctctacataggctgcgaaatccgccatcaccagatacggatcgccgccctgtttgccgatactgtgcagcatctagtcgaaggcatgcttatcgccgtcgctgtatttaccgctttccagctctttcaatactgcgtccagcaccttatctttcttccgccatttcaccgggtcgtagcctttggccagaattgccttcacttgttccacggtatgaccaaaaataaagatattttcttcaccgactttctcggcgatttcaacgttcgccccatccagcgtaccgacagtaagcgcaccattgagcgccagtttcatattgccggtaccggaagcttctttacctgcagtgctaatttgttcggagatatccgccgccgggatcagtttttccgccgcgctaacgcaataatccggcaggaacaccaccttcaacttatcgccaaccagcggatcgttgttgatcacgtcagccactttgttgatcgcaaagataatattcttcgccaggtagtagcccggtgccgctttcgcgccgaagaggaagacgcgcggtacgcgatcagcctgcgggttttcacgaatttctttgtacaacgccagaatatgcagcagattcaggtgctggcgtttgtactcatgcaaacgtttgatctgaatatcgaaaatcgcctgtggattgatctcaataccggtacgaactttcacaaactccgccagacggactttattcgcctgcttgatctcgcgatattgctgacggaatttcgcatcatcagcgaatttttccagattgatcagctgatcgagatcgttagcccactctttttgcagacttttatccaacagagccgccagtgccgggttgcactgtttgatccagcgacgtggggtaataccgttggtgacgttatggaatttgttcggccatagctggtgatattccgggaacagatctttcaccaccagatcgctgtgcagcgccgcaacaccgttcaccgcgaaaccgccaaccacacacaggttcgccatatgcacttgtttgtcgtgcaccaccgccagtttggcccacactttttcatcgcccggccaggttttctctaccagcgttttaaagcgagtattaatttcgttaataatctgcatgtggcgcggcagtaagcctttcaccagtttcacatcccagcgttccagcgcttctggcatcagggtatggttggtgtaagcgaaagttttgctggtaatggcccaggcgtcatcccagctcatctggtgctcatcgatcagcacgcgcagcagttctggaatcgcgatagttgggtgggtatcgttcagctgaataacttcgtaatccgccagttcgtgcagtttacgccccgccagatgatggcgacgcaaaatatccgctacgctacaggcacactggaagtattgctgcatcaggcgcagctttttaccggcagtatggttgtcgtttggatagagaactttggtcagtttttccgcattgatgccctgctgttcggcacgcaagaaatcaccgtcgttaaatttagtcagatcaaacggatgcgcgtgcgtcgcctgccacagacgcagcggctgcgccacgccattacgatagccgacaacggggagatcccacgcttgaccggtaatggtaaactccggctcccagcgtccgtctttcgtcactttaccgccaatccctacctgcacatccagtgcttcgttgtggcggaaccacgggtagttactgcgatgccagtcatccggcgcttcaacctgtttgccatcgacaaaagactggcggaacaaaccatattgatagttcagaccgtaacccgtcgcagactgaccgacagttgccatactgtcgaggaagcacgccgccagacgtcccagaccaccgttacccagcgccgggtcgatctcttcttccagcaggtccgtcagattgatgtcataagccttcaagctatcctgtacatcctgataccagccgagattcaacaggttgttgcccgtcaggcgaccaatcaaaaactccatactgatgtagttaacatgtcgctgattcgccaccggcttggcgaatggctgagcacgcagcatttcggccagtgcttcactcactgctagccaccactggcgaggagtcatttcagccgcagaatttaagccataacgctgccactgacgactaagcgcttcctgaaattgcttatcgttaaaaataggttgactcataggagttccacttttcttagattttcaacacaacgttatcgctagtttgccaggctcgatgttgaccttcctcatcctgcgggggattaggcagggaggagttgcggggatgagcaaggaaatgtgatctcaaccacttaaagctagtgcaaaccacaggattagcatcaaatcaatgcaatacagcgcagaaaatctgtatctaagtgcaaaaaatggccgttgcgtattttcaaaaagcggaaggtaactctataaattaagtaaaggagtgaaacagtttcataagtaaaatatccagtgtgctccatctcattcttaatagatttattaagatcatctttttagatggcactttcatcaggaatgaagaagaaacccttgcttaaatgaatctgatgaacataagggaaaccagtattcacgctggatcagcgtcgttttaggtgagttgttaataaagatttggaattgtgacacagtgcaaattcagacacataaaaaaacgtcatcgcttgcattagaaaggtttctggccgaccttataaccattaattacgaagcgcaaaaaaaataatatttcctcattttccacagtgaagtgattaactatgctgattccgagtaaactaagtcgtccggttcgactcgaccataccgtggttcgtgagcgcctgctggctaaactttccggcgcgaacaacttccggctggcgctgatcacgagtcctgcgggctacggaaagaccaccctcatttcccagtgggcggcaggcaaaaacgatatcggctggtacagcctggatgaaggtgataaccagcaagagcgtttcgccagctatctcattgccgccgtgcagcaggcaaccaacggtcactgtgcgatatgtgagacgatggcgcaaaaacggcaatatgccagcctgacgagtctcttcgcccagcttttcattgagctggcggaatggcatagcccactttatctggtcatcgatgactatcatctgatcactaatccagtgatccacgagagtatgcgcttctttattcgccatcaaccagaaaatctcaccctggtggtgttgagtcgcaaccttccgcaactgggcattgccaatctgcgtgttcgtgatcaactgctggaaattggcagtcagcaactggcatttacccatcaggaagcgaagcagttttttgattgccgtctgagtagcccgattgaagccgcagaaagcagtcggatttgcgatgacgtttccggttgggcgacggcactacagctaatcgccctctccgcccggcagaatacccacagtgcccataagagcgcacgccgcctggcgggaatcaatgccagccatcttagcgattatctggtcgatgaggttttggataacgtcgatctcgcaacgcgccattttctgttgaaaagcgccattttgcgcagtatgaacgatgccctcatcacccgtgtgaccggcgaagaaaacgggcaaatgcgcctcgaagagattgagcgtcaggggctgtttttacagcggatggatgataccggcgagtggttctgctatcacccgctgtttggtaacttcctgcgccagcgctgccagtgggaactggcggcggagctgccggaaatccaccgtgccgccgcagaaagctggatggcccagggatttcccagcgaagcaattcatcatgcgctggcggcaggcgatgcgctgatgctgcgcgatattctgcttaatcacgcctggagtctgttcaaccatagcgaactgagcctgctggaagagagccttaaggccctgccgtgggacagcttgctggaaaatccgcagttggtgttattgcaggcgtggctgatgcaaagccaacatcgctacggcgaagttaacaccctgctagcccgtgctgaacatgaaatcaaggacatcagagaagacaccatgcacgcagaatttaacgctctgcgcgcccaggtggcgattaacgatggtaatccggatgaagcggaacggctggcaaaactggcactggaagagctgccgccgggctggttctatagccgcattgtggcaaccagcgtgctgggtgaagtgctgcactgcaaaggcgaattgacccgcagtctggcgctaatgcagcaaaccgaacagatggcacgccagcacgatgtctggcactacgctttgtggagtttaatccagcaaagtgaaattctgtttgcccaagggttcctgcaaaccgcgtgggaaacgcaggaaaaagcattccagctgatcaacgagcagcatctggaacagctgccaatgcatgagtttctggtgcgcattcgtgcgcagctgttatgggcctgggcgcggctggatgaagccgaagcgagcgcgcgtagcgggattgaagtcttgagctcttatcagccacagcaacagcttcagtgcctggcaatgttgattcaatgcagcctggcccgtggtgatttagataacgcccgtagccagctgaaccgtctggaaaacctgctggggaatggcaaatatcacagcgactggatctctaacgccaacaaagtccgggtgatttactggcaaatgaccggcgataaagccgccgctgccaactggttgcgtcatacggctaaaccagagtttgcgaacaaccacttcctgcaaggtcaatggcgcaacattgcccgtgcacaaatcttgctgggcgagtttgaaccggcagaaattgttctcgaagaactcaatgaaaatgcccggagtctgcggttgatgagcgatctcaaccgtaacctgttgctgcttaatcaactgtactggcaggccggacgtaaaagtgacgcccagcgcgtgttgctggacgcattaaaactggcgaatcgcaccggatttatcagccattttgtcatcgaaggcgaagcgatggcgcaacaactgcgtcagctgattcagcttaatacgctgccggaactggaacagcatcgcgcgcagcgtattctgcgagaaatcaatcaacatcatcggcataaattcgcccatttcgatgagaatttcgttgaacgtctgctaaatcatcctgaagtacctgaactgatccgcaccagcccgctgacgcaacgtgaatggcaggtactggggctgatctactctggttacagcaatgagcaaattgccggagaactggaagtcgcggcaaccaccatcaaaacgcatatccgcaatctgtatcagaaactcggcgtggcccatcgccaggatgcggtacaacacgcccagcaattgctgaagatgatggggtacggcgtgtaagtttagccggataacgcgccagatccggcttacatctctgcatcattcaatgctcacccgcgttacgccatctgtttctatcaaactaaaccgcaccggcaagaaacgctccaccaccgcgatattggtcagcagatggcaactgggatgggcgaccgtaaattcccccgcgcccgccagcgccatcggtagcaccagttggtcagcaagatattcccccaccgccgccgtgcttgccaggtagcgtttcacctctttcaccaactgtgccgcaaccacctcggcactgacgcgcttttcaccgacgacaaaaaagcgttcggtgatattttcactttcgacttcaaggctgacggtattacccggcccctggtcgcgcggcaggttatgaatattctgttcatgcagggaaaaactccccgccagtgtagcgatttcacgctcagcaacatggcgcggcacaccagctaatagaacttctccacgcatctgcacaatgttcccgcgctcgccaagttgcaaggtgttaaagcttgccacggggctgacttccgttgccaccacaccgcctccggcagggtaaaaaccgtggcgtaacagcgtggtttgctgatgaattcctattttcgccagcagcggctccagcacccggcggataaaatccgcaggcggcgcgctcgggttatcggtgccgccgctcacttcaacacggctaggtccatcggcaaaccacagcgcgggcagcaccgtttgcagcaccagcgtacaacttccggcgctaccgatagcaaagcggtaatcgccgccgcgcacggtgccgggccggaagagcagacgctggctccccagctccgcgccttccacggttgctccgcaaatttccgtcgccgcctttaccgcggtcagatgctggcgcaacagccccggtttcgcccgcccggcacgaatgctggtgatggtaaatggctggccggttatcatgctcaggctcagcgcgctgcgcaggatctgcccgccaccttcgccctgtgcgccatccagcgcaatcatccttttcatcatttatccttttacgcacaccacctgacgcagggtatagataacttccaccagatcgctttgtgccgccatcaccgcatcaatatctttatacgccatcgggatttcgtcgatcacttcggcatctttacggcattccacatgcgcggtggcacgaatttgatcttccacgctgaacagttttttcgctttagttcggctcattacccgcccggcaccgtggctgcagctacagaagctctcttcatttcccagcccacggacgataaagctttttgctcccatgctaccgggaataattccatattgaccagcacgcgcagacaccgcgcctttacgcgtcacgtagatctcttcaccaaagtgctgttctttttgcacatagttgtggtgacagttgatctcttccatcgccagcgtttgtggctgtctgaccgttttctgcgtaatgctctgcaatgccgttaccacgttttccatcatcgcatcgcggttaaggctggcaaaaagctgcgcccaggccacggctttcaggtaatcatcaaagtattccgtaccttccataaagtacgccagatcacggctcggcaacgtctcaagcgtttcctgcatctctttttgtgccagatcgataaagtaagtcccgatggcgttaccaattccgcgactaccggagtgcagcataatccacacctggtcgctctcatcaaggcagatttcaataaagtggttaccggttcccagcgttcccaggtgtttatagttattggtattcaggaaacggggatatttttgcgttaaccactgataaccggcttcaagctcagcccatttagcatcgacgttaacaggtggattttcccaggcacctttatcacgtttacaacggccagtggtacgcccgtgcggcacggccgtttcaatcgcctgacgcagctctgccaggttttcaggcaggtcttccgccgttaacgcggtacgcagcgcgttcattccacagccaatatccacgcccaccgccgccggaataatcgcccctttggtcgggatcacgctaccaatggtggaacctttacccaggtgtacatcaggcattaccgcaatatgtttgaaaataaacggcatcttcgccgtattaataagttgctgacgcgcatcggcctctaccggcacgcctttggtccacatttttaccggggcattttcagtggtcagtaattcgtaattcattttgtttttctcttttcgttgtttgctgtcctgataattgcaaccgtcgtgccagaaaattaaataagcagcttaattttttaattcattgttttaaaaaagattatatctttacgtccgtaaccggagatttcccgcaaagccaatttaccgataatgaaatatcgtcttttataaggatatctaagatgcgtaaaacagtggcttttggctttgtcggtaccgtactggattatgccgggcgcggcagtcagcgctggagtaaatggcgtccgacactctgtttatgccagcaagaaagcttggtcatcgatcgactggaattgttgcacgacgcccgcagccgcagcctatttgaaacgcttaaacgcgatatcgccagtgttagcccagaaacagaagtggtgagcgttgagattgaactgcataacccgtgggatttcgaagaggtctacgcctgcctgcatgatttcgcccgtggttacgagtttcagccagaaaaagaagactatttaattcacatcaccaccggtacccacgtcgcgcagatttgctggtttctgctggcagaagcgcgttacctgcccgcccggctgatacaatctagtcctccgcgcaaaaaagaacagccgcgcggcccaggtgaagtaacgattatcgatctcgatttaagccgttataacgccatcgccagccgctttgccgaggaacgccagcaaacgcttgattttcttaagtccggcattgccacgcgtaacccccacttcaaccgcatgattgagcagatcgaaaaagtggcgatcaaatcccgcgcgccgattctgcttaacggtccaaccggcgcgggcaagagttttctggcgcgacgcatcttagagttaaaacaggcgcggcatcagtttagcggcgcgtttgtggaagtgaactgcgccaccctgcgcggcgataccgccatgagcacgctgtttggtcatgtaaaaggcgcgtttaccggggcgcgggaatctcgtgaaggtttattacgcagcgccaacggcggaatgttgtttcttgatgagattggcgaactgggcgcagacgaacaggcaatgctgctgaaagccattgaagagaaaaccttttacccgtttggcagcgatcgccaggtgagcagtgattttcagcttatcgccggaacggtgcgcgatttgcgccagctggttgccgaaggcaaatttcgcgaagatctgtacgcgcggatcaatctctggaccttcaccctgccgggtctacgccagcgccaggaagatattgaaccgaacctggattatgaagtggagcgccacgccagtctcactggcgacagcgtgcgttttaacaccgaagcgcggcgcgcctggttggcttttgcgacctctccccaggcaacatggcgcggtaactttcgcgaactttctgccagcgtcacgcggatggccacctttgccactagcggacgcatcactctggacgtggttgaagatgagataaaccgtctgcgctataactggcaggagagccgcccctccgcgcttacggcgttgctgggcgcagaggcagaaaacatcgatctcttcgaccgtatgcaactggaacacgttatcgctatctgccgccaggcaaagagcctttccgcagccggacgccagctttttgacgttagccgccagggcaaagccagcgtcaatgacgcggatcggctacgcaaatacctggcgcgttttggtctgacgtgggaagccgtgcaggatcagcacagctccagttgaatatggtggtccgtcagcacctgcatcacgcttactggcggcggggcgtcggtgtagacggcatctaccatgctgatgctgcccatattgaccatcgcgttacggccaaatttcgagtgatcgacaaccagcataacgtggcgcgagttctcaataatggcgcgtttggtgcgaacttcgtggtaatcgaactccagcagcgagccgtcgctatcgatgccgcttatccccagaatgccgaaatcaaggcggaactgggagataaaatcgagcgtcgcttcgccaatgatcccgccatcgcggctgcgtaattcgccaccggcgagaatgatgcgaaaatcttcttttaccatcaacgtgttagcaacgttgagattgttggtgacaatgcgcaaattgctgtgattgagcagtgcgtgcgctaccgcttccggcgtggtgccgatatcgataaacagcgtcgagccattggggatttgctccgccactttgcgggcgatgcgctctttttcttcggtctgggtggccttgcgatcgtgccacggcgtgttaaccgaactggaaggcagcgccgcaccgccatgatggccaggatcaggttttgctccgccagctcattgaggtcgcggcgaatagtctgcgggctgacggagaaatgctctaccagctcttcggtactgacataaccctgctgtttaaccagttcgataataccgttgtgacgttgtgtttgtttcatttataaatccctggaattattttcgttttcgcgcattgaggctatcaacaaaagccatcgctaaacccacggctaacccggcgatgtgtgctccgttcgccatgctcatcccaaacaaatcaaaccatccggcgacaatccagatcagcgcaaagataattaacccacgttgcaggtaaatgccactttgcggatcgcgttcgccacgtagccagacgtagcccatcagcgcatacaccacgccagaaagcccgccaaaccacggcccgctgaatttttgctgcacatagccgcttaacagggcgctgataagcgtaatgacaattagcttaccgctaccgaggcgtttttccaccgcaccgccgagataccaccaccagagcaggttaaagaggatatgcatcaggctgaagtgcattaacgcgtgggtgaagtaacgccagaactcaaatttcagtgttggatcgaatggccaggccagccataacatcacttcctgatcgccgagaatttgcatggcaataaacaccaccacgcaggcgatcatcatcacccaggttaccggacctgcgcgttcacgcaaggcggcaaagaaaggataacggcgataatgcaggccactgccggtatggcctgcctgccagctcgccgccagataacgcggatctgccgggttttcgagaaaacgcgccagctccgcccgtacgcgctcggcctgggactcatccgccagccagacatcgctttggttatgttgttgaatcgtgaggataacaccctgcgtcgccatgtaatcaacaaacgcctgcgccacgcgggggttagcaaaagaggtaatcatcaacatcgttgctgtcgcttattccacacaaaaggggacagtataaagcgttacgcgccgtacgccacctctgcgggaaactgacgttgccaggcttcaaagccgccgtcaatgctatagaccacatcgtagccctgttgcagcagatactgcgccgcgcctttgctgctattgccgtgataacacatcaccatcaccggagtgtcaaagtcgttatcacgcataaaagcgcccagcgtgtcgttggttaaatggaaagcctgcaccgcatgtcccattgcgaaactctgtggatcgcgaatatcgaccagcaccgcctctttttcctgcaacttctggtgcgcgtcggcaacgttaatacattcgaactgatccatgcgtctctctttctttacaaacaagtgggcaaatttaccgcacagtttacgtcgaagcggcagataaacgccataatgttatacatatcactctaaaatgttttttcaatgttacctaaagcgcgattctttgctaatatgttcgataacgaacatttatgagctttaacgaaagtgaatgagggcagcatggaaaccaaagatctgattgtgatagggggcggcatcaatggtgctggtatcgcggcagacgccgctggacgcggtttatccgtgctgatgctggaggcgcaggatctcgcttgcgcgacctcttccgccagtagtaaactcattcacggtggcctgcgctaccttgagcactatgaattccgcctggtcagcgaggcgctggctgaacgtgaagtgctgctgaaaatggccccgcatatcgccttcccgatgcgttttcgcctgccacatcgtccgcatctgcgcccggcgtggatgattcgcattggtctgtttatgtacgatcatctgggtaaacgcaccagcttgccgggaagtactggtttgcgttttggcgcaaatagtgtgttaaaaccggaaattaagcgcggattcgaatattctgactgttgggtagacgacgcccgtctggtactcgccaacgcccagatggtggtgcgtaaaggcggcgaagtgcttactcggactcgcgccacctctgctcgccgcgaaaacggcctgtggattgtggaagcggaagatatcgataccggcaaaaaatatagctggcaagcgcgcggcttggttaacgccaccggcccgtgggtgaaacagttcttcgacgacgggatgcatctgcctagcccttatggcattcgcctgatcaaaggcagccatattgtggtgccgcgcgtgcatacccagaagcaagcctacattctgcaaaacgaagataaacgtattgtgttcgtgatcccgtggatggacgagttttccatcatcggcactaccgatgtcgagtacaaaggcgatccgaaagcggtgaagattgaagagagtgaaatcaattacctgctgaatgtgtataacacgcactttaaaaagcagttaagccgtgacgatatcgtctggacctactccggtgtgcgtccgctgtgtgatgatgagtccgacagcccgcaggctattacccgtgattacacccttgatattcatgatgaaaatggcaaagcaccgctgctgagcgtattcggcggtaagctgaccacctaccgaaaactggcggaacatgcgctggaaaaactaacgccgtattatcagggtattggcccggcatggacgaaagagagtgtgctaccgggtggcgccattgaaggcgaccgcgacgattatgccgctcgcctgcgccgccgctatccgttcctgactgaaagcctggcgcgtcattacgctcgcacttacggcagcaacagcgagctgctgctcggcaatgcgggaacggtaagcgatctcggggaagatttcggtcatgagttctacgaagcggagctgaaatacctggtggatcacgaatgggtccgccgcgccgacgacgccctgtggcgtcgcacaaaacaaggcatgtggctaaatgcggatcaacaatctcgtgtgagtcagtggctggtggagtatacgcagcagaggttaagcctggcgagctaaattaacgtaaggtgatcaggtcagatttcaatctggcctgagactgatgacaaacacaaaactgcctgatgcgctacgcttatcaggcctacgtggtttatgcaatatattgaatttgcatggtcttgtaggccagataagacgttcacgtcgcatccggcatgaacaaagcgcactttgtcaaaaatctaacctactttttaattcagggaattaccgcaaagcccacgccatcatacccaacgtaacaaaactcaggcacgttccccactcgcccgctgaaaaatagcattaatgcgcccagcgccagcataaaaattttgagcagaaggtaaattgttggcgtgataaggatattacaaacttcaataataccggcaagtccgacacccagcatggcaataaccaccgccaaaaattgcgccagtatggggatgccgaaaaaagtcattaccaggctggtcaaaatccattttctgttttgcattattctttccattctttttgaatggtgaaattatactccccgagtccccttgccccttctggacacttttccgaaatgatggcggaaaaaaacgggaccctttggccccgttctatttattggtgaacttacaatctcaccggatcgatatgccagatatgatcggcgtactctttgatagtacggtcagaagagaagtagcccatattggcaatgttcagcatcgcttttgcggtccactcttcctgaagctcgtagagttcatcgactttatcctgacaatcgacatagctgcgataatccgccagtacctggtagtgatcgccgaagttgatcaggctatcaaccagatcgcgatagcgacccggatcttccggactgaatacaccgctgccgatttgcgtcagcacctgatgcagctcctcatctttctcgtagtattcacgcggtttgtagccctgacgacgcagttcttccacttcttccgctgtgttaccaaaaataaagatattgtcagcaccgacatgatccagcatctcgacattcgcaccgtccaacgtaccgatagtcagcgcaccgttaagcgcaaacttcatgttactggtgccggaagcttccgtccctgccaggctaatctgttcagacagatctgccgccggaatgatcaactgcgccaggctaacgctgtagttcgggatgaacacgactttcagcttatcgccaatctgcggatcgttgttgatcactttcgctacgtcattgatcaaatgaataatgtgcttcgccatgtaataggcgctagccgccttaccgccaaaaatattcacgcgcggtacccacttcgcatccgggtcggccttgatgcggttatagcgggtaatcacatgcaacacattcatcaattgacgtttgtattcgtgaatacgtttgatttgtacatcgaacaacgcctttggattcaccaccacattcagctgctgggcgatatactctgccagacgctttttgttctccagcttcgcctgatgcacagcgtgattaaccattgggaaatcacagtgttgttgcagctcattaagcaggctaaggtcggtgcgccagttacggcccaggtgttcgtccagcacggcactaaggcttgggttcgctaccgccagccagcgacgcggcgtcacaccgttggtgacgttggtgaaacgacccgggaagattttcgcaaagtcggcaaacaagctttgcaccatcagattagagtgcagttcgcttacaccgttaactttgtggctcacaacaaccgccagccaggccatacgcacacgacgaccgttggattcatcaatgatgctcgcccgtcccagcagatcggtatcgttcggatactgttcctgcaaggttttcaggaaatagtcgttgatttcaaagatgatctgcaggtgacgcggcagaattttacccagcatatcaaccggccaggtttccagcgcctcgctcatcagcgtgtggttagtgtaggagaagacctgacaacacacctcaaacgcgtcgtcccagctaaattggtgctcatcgatcagcagacgcatcatctcaggaatgctcagtaccggatgggtatcattgagatgaatcgcgattttatccgccaggttatcgtaggttttatgcaactgataatggcggcttaaaatgtcctgaatggtgctggaaaccaggaagtattcctgacgcaggcgcagctcacgcccggagtaggtggagtcatccggatacagtacgcgagatacgttctcggagtggtttttatcttccactgccgcgaagtagtcaccctggttgaatttaccgaggttaatttcgctactggcttgcgcactccacaaacgcagcgtgttggtcgcgtcggtgtcgtaaccagggattatctgatcgtaagcgactcccagaatctcttcggtttcaatccagcgcgtttttttaccttcctgctgaatgcgaccgccaaaacggactttatagcgcgtgttgtggcgtttgaattcccacgggttaccgtattccagccagtagtctgggctctctttctggctaccgttaacgatgttctgcttgaacataccgtagtcatagcggatgccgtaaccgcgccccggcaaccctaacgtcgccagagaatcaaggaagcaagccgccagacgtcccaggccaccgttaccgaggcctgggtcattttcttcatcaatcagctcttcgagatttaaccccatcgcttccagtgcgccctgtacatcttcgtaaattcctaggctcaacatggcgttggagagcgtacggccaatcaaaaactccatgctcaggtagtaaacctgacgagtttcttggctcaactgggcacggttactacgtaaccagcgctccacgagacgatcgcgcacagcaaataacgttgcgttcagccattcatgtttattggcgacgaccgggtcctttccaatcgtaaacatcagcttgtaagcgatagagtgcttaagagcttctacgctaagcgtggggctactatatgtaaacggagcattcatataggcgtttcctgaaaattatttcaagcgatagtaaagctcacggtagctcttcgccgcgacctgccagctaaaatccattgccatagcctgacgttgcacaaaccgccacagactaggacgggaccacagtacaaaagcacgtcgaatagcccgtaacaggctccaggcattactatcttcaaagacaaacccactggcgacgccatctgcaaggttctcaagagaacagtcagaaaccgtatcagcaagcccaccggtgcgccgcactaacggcagcgtaccgtacttcaatccataaagttgcgttaagccgcacggttcaaaacggctgggcaccagaatgacgtccgcgccgcccataatgcgatggctaaatgcttcgtgatagccaatctgaacgcccacctgaccggggtattccgctgccgccgcaaggaaaccttcctgcagcaccggatcgcccgcgccgagtagcgccagctgcccgccctgctccagaagacccggtaaggcttccagcaccaggtcgagacctttctggctggtcagacggctcaccactgcaaaaagcggcactttatcgtcaaccttaagccccattgcgatttgtaactggcgcttattttccgctttatcttccaacgtatcgcgggtgtaacggctggccaacagtaagtccgtctctggactccagattttctcgtccacgccgttcagtacgccggaaagacgcccttcacggtgacgctgttgcaacagaccttccataccgtaggcaaactgcggttcggtgatctcgcgagcgtaggttggactgaccgccgtaatgtgatcggcatagtacagaccggccttcaggaaagagatttgtccgttgaattccagcccatgaatattaaagaaactccatggcaattggatgtcattcatgtgatgtgcataaaacatgccttgataggccaggttgtgcacagtaaacacgctcttcgccggacgcccgcgcgccgccagatacgcaggcgcaaggcctgcatgccagtcgtgcgcatgcaccacatcaggacgccagaatgggtcaagcccgctggccatttctgccccaacccaccccagcagcgcaaaacgcaatacgttgtcggtataggcaaataagttggtatcgtgatacgggcttcccggacgatcatagagatgcggcgcgtcaatcaggtaaatgccaaccccgttgtaatgaccgaacaacagcgtgatatgtccggcgaaggtatcacgacgggatactacctgcgcatcggtcacgccacggcgaatatcgggaaatgcaggcaacagtacgcgagcgtcaacgccgtctgcgatttgtgctgcgggtaatgccccaataacatcagccagaccgccggttttaagcagcgggaacatctcactacatacatgtaaaacctgcattatcgctcctgtttatgccctaacttccgtagcatttcgcgcgttaccagcacgatgccttcttcactacgatagaaacgacgtgcatcttcctctgcgttttcaccaatcaccatgccttccggaataacacaagcacgatcgatgacgcagcggcgcagacggcagctgcgacctacccatacttccggtaacaatacggcggaatcaatgttgcagaaactattcacgcgaacgcggctgaacagaacggactgcaccaccacgctaccggagatcacacaaccgccggaaaccagactgttaagggtcatcccgtggctaccggagcgatcctgcacgaatttcgctggcggtaaactttcattgtaggtgcgaattggccaattgcgatcgtacatatccagttccggcaccacagaggccagatcgaggttcgctttccagtaagcttccagcgtacccacatcgcgccagtacggctcggcatccgggtcggattgtacgcaagagagcgggaacgggtgcgcataggccagaccggcttcggtgatcttgggaatcaaatctttgccaaagtcgtggctggagttctcatcgcgatcgtcttcttccagcagttcatacagatagtcggcgtcaaagacgtagatacccatactcgccagagatttgctcggatcgttcggcatactcggcgggttagcaggtttttcaacgaattcgataattttatcgttctcatcaaccgccataacgccaaatgcggaggcttcttcaatcggtactggcatacaagcaacggtgcaacgtgcgcctttttcgacgtgatcgataagcatacggctgtagtcttgcttgtagatatggtcgcccgccaggatcaccacgtattccgctttataacggcggataatgtcgaggttttgggtgaccgcatctgcggtgccgcgataccagttttcccctttcattctctgctgtgctggcagcagatcgacaaactcgttcatttcttcattgaagaaactccagccgcgctgaatgtgctgcaccagagtgtgggactggtactgggtgatcacgcccatacgacggatcccggagttgatgcagttagacagcgcaaagtcgataatgcggaacttaccgccgaagtgtacggccggttttgctcgcttattggttaaatccttcaggcgggtaccacgtcctcccgccagtatcagggcaacagatttcaatggcagctggcgcgccaacattaagtgatcgttcttctctaaactaaccatgactaactccttttttatcatctctggaacacacacaatccgtgtgcaggtccctgccagacagccgtaatcactgggttatcctctccagcgaatgggggaatggcgtgccactccccagcaggtaaaacaatctctgttacctcaagcgtggcgttaattgcgatcaaaaagcgatcgctgagcagaatttgcagctgtttcggcccgttttgccactcatccgtgcttaaaggttgagcatatcgatttagccaacggacattgccgtcgccttcttcccaccagcgattctccaccaaagcgggaatgcgcttgcgcagatggattaacgcggcggtaaatgcggttaaaccactgcttgcctggctccagtccaaccaggttaattggttatcctgacagtaggcattgttattgccatgctggctgtgaccatgttcgtcaccggccagtaacatcggcgtaccctgggagagcaacaacgttgttaacagggcgtgaatgctgtcgcgccgccgttcaaccaggtcaagagaaccgcctaacccttctttaccatgattgttactgtaattgttgttggtcccgtcgcgattttcttctccgtttgcttcattgtgtttatggttgaagcaaacgcagtcgcgaagcgtaaaaccgtcatgcgcggtgacgagattaatcgcggcactcggcagacgaccattacgtttaaaaacatcgctggaggcagcaaaacgcccggcaaacgcccccagaggcaaatcataatgtagccagaaacgacgggcagcatcgcggaaatgatcgttccactcggcaaacagcggcgggaaatttcccacctgataaccaccaggagcgatatcccacggttcagcaattaacttcacctggctgagcaccgggcagttctggatagcggtaaacaacggcgcatcctgacggaactctggcgtacggcccatgactgccgccagatcaaagcggaaaccatcgacgtggcaggtttctacccaataacgcaggcaggcgctggcataatccaccaccgccggatgactcaaattgagcgtgttgccgcaaccggtccagttgtgataatcgccgtcttctcttatccaataatagctacggttatcgatcccacgcaggctgaataacgggccgtcgaggtccagttccgcactatggttgagcacgatatcaagaatgacttcgatacccgctttatgcagtgctttgattgcatcgcgaaactcatccagcgccgtttctgggctgcaggcatacgccggatgcagcgcaaacatcgccaccgggttgtaaccccagtagttacttagccccatgcgttgcagacgtggttcactggcaaactgcgccactggcagcagttccagcgcggtaatgcccaattgtttcaaatagttgatcatcaccggatgcccgagggctttataagtgccacggatctcgaccgggatctccgggtgcaagtacgttaatcctttgacatgggcttcataaatgatggtgctgccccacggcgtgcgcggcggggcatcatcttcccagtcatagtgatcaaccaccactacgcatttcggcgcaatggcggcgttgtcgcgatagtcaggttcattatgaccggcgtgcagcagcgggttatctttaaactccccgtcaatttgccgcgcgcaaggatcaatcaacaacttcgccgggttaaagcgatgcccctcggcgggttgccaggggccatgaacgcgataaccataacgcaaacccgggcgcgcatccggcagataaccgtgccaaatgtcgccactgtgccctggcaagtcatagcgatgttcctggccattggcgtcaaagacacacagttctacccgctcggcatgagcggagaaaagtgtgaagttgacgccctgaccgtcgtaatgcgcgccgaggggagcgggtttgccaatggcgagttgtgtcattctgcctcccgaaccagccagatagtggccagcggtggtagcgtcaggcttagactatgctgacgaccgtggctggcaatctcatcgctgtgtaccgtgccgccattgcctgcattactgccgtgatagtgcatggaatcggtattgaggatttcacgccatttgcccggctggtttatgccgaagcgataatcatgacgcggtaccggcgtaaagttactggcaacgatgatttcgttaccctctttatcgcgacgcacaaagatcagcacgctgcgttctttgtcatccaccaccagccattcaaagccgtacgggtcaaaatccagttcatgcattgctttatggtggcggtaggtgaggttcagatcgcgcaccagacgctggacaccgtggtgccagttatcgccgccttccaacagatgccagtcgaggctggcgtcatggttccactcgcggccctgggcaaattcgttacccatgaacagtagtttcttgcccgggaatgcccacatccagccatagtaggcgcgcaggttcgcgaatttctgccatgcgtcgcccggcatgcggtcgagaatgctttttttaccgtggaccacttcatcatggctcaacggcaggacgaagttttcagtgtagttgtagagaatcccgaaggtcagtttatcgtgatgatactgacgataaaccgggtcgagcttcatgtagtccagggtgtcatgcatccagccgaggttccacttgtaccagaagcccagaccgcccatatcctgcggacgagaaacgccagggaaatcggtagactcctcagccattgtcaccgcaccggaaacctgctcaccaagaatacggttggtattacgcaagaattcaatcgcttcaagattctcgcgcccgccaaattcgttcgggatccactccccctctttacggctgtagtcgcgataaatcatactcgccaccgcatcgacgcgcagcgcatcaataccaaaacgttcaatccagtaaagcgcgttaccgacgaggaagttactgacttcacggcgaccatagttgtagatcagcgtgttccagtcctgatgatagccttcacgcggatcgctgtgttcatacaagttcgtgccatcaaattcggcaagcgcaaagtcatcagtcgggaagtggcctggcacccagtcgagaatcacgttcagaccagctgcgtgtgcggcatcaatgaaataacggaagtcgtcgcgagtaccaaaacggcgggttggcgcatacaggccggttggctgataaccccaactgccatcgaagggatgctcgttaatgggcagtagttcgaggtgggtaaagcccatccatttagcataaggcaccagttgatcggccagctcgcggtagctcaaccagaaattgttgtcggtgtggcgacgccaggaacccaggtgaacttcataaatagagattggcgcatcaaactgattcgcttttttgcgctcttcagtctgtacaaccttttccggcagcccgcaaataagagacgcggtttccgggcgcatttgcgcttcaaaggcataagggtcggacttcagacgcaagttgccattggcatcaatcatctcgtatttatagagctgaccgttatgcgccccagggataaacagttcccagatgccgctctctttacgcaggcgcatcgggtgacggcgaccgtcccagtagttgaattgcccaaccacgctgacccgacgggcgtttggagcccagacagagaaacgcgtacctgtgacgccatccatagtatctgcatgcgcgcctaaggtttcatacgggcgcaggtgagtaccttcagataatagccaggcatccatttcctggattagcggaccaaaacggtaaggatcatcaatcaggttttgctgaccatgccagacaacagccaactgatagcggaaaaaattcttacgtcgcggaatgacgccgctaaagaatccccgactgtcgagacactccagttttgcgagtttgcgcccggttttcggttcaatcacccacacatcggtagcgtcgggtaaaagggcacggacttccagtcccgcggtggttttatgcattcccagtacggaaaaaggatccgcaaaatggcctgcaattagcgcgttaatcacgtctctatcgatacgatcggacatgcttgtcttcctgttttattgtgtcaccccatccaattggatttttgacttctggttgtgacatttttttgacctgaacggcgcagcactctgtgcatcctctctgcgtcgtcctcacttcaggtaaggctgtgaatactcatgtattcagccacccttaaagaatagccaatgctctatttaactcccggtaaatcatgaaacatctgcgcttactcctgtattacgcactaacaggggcggcatcgcgccccagatttaatgaataaagattacgccagttgacgaagcatccgacgcagcggctccgcggccccccacagcagctggtcgcccacggtaaaggcactcaggaactctggtcccatattcagcttacgcaggcggcctaccggcgtggtcagcgtgccggtaacggcagctggggttagctcacgcatagtgatttcccgatcgttcggaacgactttcgcccacggattgtgcgcagccagcagttcttccacggtcggaatagacacatcttttttcaatttaatagtgaatgcctggctgtggcagcgcaatgccccgacacgcacacataaaccatctaccggaattacggaagatgtgttgaggatcttgttggtttccgcctgccctttccactcttcgcggctctgaccgttatcgagctgtttgtcgatccacggaatcaggctacccgccagcggcacgccaaagttatccaccggcagctcaccgctacgggttaaggttgtgactttgcgttcgatatcgagaatagcagaggacggggtcgcgagttcatctgccacatggccatacagatggcccatctgggttaataactcacgcatatgtcgcgcaccaccgccggaagcggcctggtaggttgcaacggacacccaatcaacaagatcattggcgaataaaccacccaagctcatcaacatcaggcttacggtacagttaccgccaacaaaagtcctgatgccattatttaatccgtcggtaatgacgtcctgattgacggggtcaagaatgatgatggcgtcatctttcatgcgcagagagcttgctgcgtcaatccagtaaccttgccatccgctttcacgaagctttggatagatttcgttggtataatcgccgccctgacaggtcacaatgatatcgagggcctttagcgcctccagatcaaaggcatcctgaagtgtgccagtggttccgccaaaagacggcgcagcctggccaagctgagaagtagaaaagaagacagggcgaatggcgtcgaagtcgcgctcttcaaccatgcgttgcatgagaacggagccgaccataccgcgccagccgataaaaccaacatttttcataagcgtttttttcctgcaaagatgtgtgctgtataaatgtgccggtctcctcttggcacatctttcaccatacaaaaagcagccaaagtcgcaagtgaaattaatcaatgatagcgaagccatcagtaatgcgacttatcctgctttgttagcacgcagaaagtccgcggcaattatcagggaatttgagttatgaatgaaatcatttctgcagcagttttattgatcctgattatggatccgctcggaaacctacctattttcatgtccgtactgaaacatactgaaccgaaaagacggcgggcaatcatggtgcgagagttgcttattgctctcctggtgatgctggtgttcctgtttgcgggtgagaaaattctggcatttcttagcctacgagcagaaaccgtctccatttctggcggcatcattctgtttctgatcgccattaaaatgattttccccagcgctagtggaaatagcagcgggcttccggcaggtgaagagccatttatcgtgccgttggcaattccgttagtcgccgggccgactattctcgccacgctgatgttgttgtctcatcagtacccgaatcagatggggcatctggtgattgctctgctgctggcctggggcggcacctttgtcatcctgctacagtctagcctatttttacgtctgctgggcgagaaaggggtgaacgcacttgaacgcctgatgggattgattctggtgatgatggcaacccagatgttcctcgacggcattcgaatgtggatgaaggggtaacgaggagagtttttcgaaaagaacccggtagcgtcacaactaccgggcgaacaaacttaactcaacagctggaacgcaatcatcccaacgatggcaccgacagtgccgaggatggtttccatcatggtccaggttttcagcgtttcggcttcggtcgcgccggtaaatttaccgaacaaccagaaaccggcgtcgttaacgtggctgacaacaatgctaccaccagcgatacaaatgctcagcgccgccatttgcgcaccggagtagttcagttgttcaataaccggcatcaccagtcctaccgccgttaaacaggctacggtggcagaaccctgaatgatgcgcactgcagctgccagcacgaagcaggtgatagcaatcggcaggcccatgccggttaacgcttcgcccagtgccggacctacgccagagtcaaccagcacctgtttgaacacgccgcccgcaccaatcaccagcagaatgatccccgccggttgcagcgcgtgaccgcaaatctccatcactttgtcttttggcatgccctgacgcattgccagaccgtaaatcgccaccagacaagcaaccagaatcgcggtaaacggatgaccgataaactcaaaccattcgtaagcagtacttccttccggcacaaaacgcgcggcaatggttttcagccctaccagcaccagcggcagcaggatcaggctcaggctgaatccgaaagatggcattttgccttcgccgagatgcggttcgctgatgtcgtcaggaatatgcagctcaacgtaacggctgatgaagttaccccacagcggcccggcaataatcattcccggaattgccgcacacaggccaatcaggatcatccagccaaagtcggcattcatctggcttgccagcagcatcggcgctggtccaggcaccagaaatgccgccgctgccgccacgcctgcaaataatgggattaccagcttcaccaggttcgtaccggtgtggcgcgccatactgaaagcaacgctaatcagcagaactatcgccacttcaaagaacagcggtagcgcacagaccagccccgcaaggccgatggcataatgcgcgcggctgtgaccgaaggatttgagcattttgacggcaatctgatcgactgcgccggtttcatgtaagatcttgccaaacatagctcccagggcgacaaccaccgccaggaagccgagggtgcctcccatccctttttccatcgtcgctgcgattttatcgagcggcataccagaaaaaaggccagcccccatggacaccaccattaaagccaggaaagcgtgcatacgcgccttcatgactaaaaacagcagcagtaaaacagaccctactgctgttaaaacaagcgttaatgtagtcactacttatttgccttttttaataacctcaatggtgcttgccacaacaccttccagcggttgatcgatatccaccaccagtacatcggtttcgtccgcacccggctcctgcagcgtttcaaactgcgtcaccaacatttgggttttaaagaaatggcctttgcgcgctttcaggcggatttcaatcacatcaaaatcgcctttcaaatagatgaaagagagattcggattaccttcacgcagcaagtcgcgatagtgttttttcaatgcagaacagacgatcaggctcactttattagtgcgctgcatagcaaacgcggcgtcgttcagcgcctgcaaccacggtttgcgatcgtcgtcattcagtggttcgccagacgccattttttcgatattgcgccgtggatggaggaaatcgccatcaagaaacgcggcatgaagttgatgcgccacttcactggcgaccgcagatttgccgctgccgcttacgcccatcaagacgtaaatgtggtgatcatggttagtcgtgctcaaagtggtgcccccacaatacaagaattaaaaatgttacgggtaactgttatcggtaacattgtccagccggacaatatcagaagcaatatccatccatgccttaagtgtataagtgtgagctacttcaaatttgtgggcttaaatagatccgcccggactcaaggtgaaacctaaatctaacattttcggtgtcacagattcgccacgaatacgcgccagcaggcgttcagcgccaatactgcccatccgctcacgcggcgtcagcacgctcgcaagtcgtggctccatcacctgaccaatgtcatgaccgtggaaaccggcaatcgccatatcgtcaggaacttttaaccccagacgctgacattcaaacgccgcgccgaccgccaggtcatcattcgtacagaacacgccatccagctgcggatattcccgccgcgcctggcgaatcagttcaataccggaagagtaagaagaagattgctcaaccatcacgctatatggcaccaggcctgcatccagcatcgcctgttcgtatcccttctgtttgatgatagtacgttcgtcgagacgtgcgccgagataggcaatgtggcgatgcccgcgagcaataatggcagtggtcatctggcgtgctgcttcaaagttatcaaaaccgacggcgatatcaaggcatgggctcttgctgtccatcagttccaccacgggaatacccgccacttcaatcatctttaaggtgcgcggcgtgtgggtacgttcggtgaggatcaggccgtcgatattccaggagagcatggattcgaggcgttcttgctccatttccggtttataaccgtagtgcgccagcatggtctgataaccgtgcgcgtcggtgacgctttcgattccgcgtaatacttccgcgaaaacctggttggtgagagaaggtaacaggacgccaatcgcccggctggtggcgttagagaggatatcgggcgcacgattgggaatatagcccagttcatcaagagccgcggcaatcttgccgcgtagagcgacggaaacctgctccgggttgcgtaaaaaacggctgaccgtcattttggtcacgcctacacggtcagccacatcctgaagtacgggtcttttctttttcatcgtcctgaaggtacaaaagagatagattctcttagtttaacacggacacatcagaaccttcccggggaaaacagtgcttgtttacaattattagatatacactaaatcaattgcatcgcattgtgctaacgacgcggcaaaaccccggaagcgtacatcagcacgcgaccggagcgagcgaggaagcctgcaaaaaggcaggcttcaaagatgccgttgagttttaaaccggcggcagatcgaacagtaacacttcgctgtcgctatccgcatggatggagattgcctgctcatcccagattgccagaccatcgctggtgctggctttcacgccgttaatggtgacattgcctttcaccacctggatccagacgcggcgttcagcggcaatctgatgcacgctctgctcatctttcagcaacgcccagcggtacagttccatatcctgatgcactttcaaactaccatctcgcgcatccgggctgagcaccagctgtttgccctgtacggcatcgaagcgacgctgttcataacgcggcgtaataccgttttcttcaggcatgatccagatctgatacagatgcagacgctcggtgctgcttgggttgtactcactgtgacgaatacccgtaccagcactcataatctggaactcacccgccggaacctgctctttattgcccatgctgtcctgatgctcaacagtaccttccagcacgtaggtcaaaatttccatatctttatgcgggtgagtgccgaagccctgccctgcttcaatcacgtcgtcgttaatcacgcgcagcgcggagaagcccataaagttcggatcgtaatagttggcaaaagagaaagtatgccaggagtccagccagccatgatttgcatgaccacgttcatttgctttgcgtaagtagatcatttgtattcgccccctgaatgatttcgatgggcttagtgtggacccgatctgcctgggatgatagagggtgaaaattgacccctctgttcaaaaaaattgaactattcgaggggccatcaaacttacttagcgagagttactgtggagggagaggcttgctcaaatccgcgttcaaggatttccagattggtaagaacttcagattccttgacgtaatttggcgcaccgtgggtgatggtttgatacaacgcatcataaacgcgcccgtaatcgcccatctccggcttcatctcttctctgaccgtcacgccctcgtcattgacatactccagcacaccgacgctatcatccgctgcgaatcccggttcgcccggcataatattagccttcaggctggtttcctgctggtcgataccgtatttaataaagctacctttcttaccgtgaacgataaatttcggataatcgattttcaccagatggctggttttgacgatggctttcaggtcgccataaaacagttgcgcttcaaaggtgtcgtcaggattggctttattacgcaggctgcggatgtcataagcgacgtgatccgggcgaccgaacagagaaataatctggtccatcgtatgcacaccaaggccataaaacgcgccatcctgcggcagcccaggtttggtttctgccaccgggcggtaatagtcaaaatggctttccacttcaacaatctctcccaacttgccactttcaatcgcttttttcgctgtcaggaagcaggagtcaaagcgacgattctgatacggcgtgacggtcagccctttgcttttcgccaacgcaaacagctctttcgcctgcgcaagtgtcggagtgaacggtttttcgaccagcacatttttcccggcttccagcgcgcgtttcgcgtactcgaaatggctgtccgcgtgggtgcagacaacaaccagcttaacatcgggatcgtttagtacttcgtcgagatcgctggtgaaatggatatgggaataaatgggagcctgttcttccggcttcgcatggcgacgaaaaatatgcgcgacatgccagctatccttgcggttaagtacatacggcagatggtaacgggtggtgcttttgccgaagccaataaaggcgcagttgatgaccatgatttcgtcctttttaaggtggttatttacaccttagcgcaaagcggacgtggttcctactggagtgcgcataacgaacacaagcactcccgtggataaattgagaacgaaagatcaaaaaaaaagccagcacccggctggctaagtaatactggaagcaatgtgagcaatgtcgtgctttcaggttctccgcgagggtcttcctgatcgcgagacaataataatcattctcattcgcacttgtccaacactttttgcaaaaaaatgcatttgactcgcatttgaaagtcaatgatgttgaaagggacatttaccccaaagaggacaaaggaacaaatgctcttcccacgaagagggccgctaaccttagtaccccgccgttaaatcatccacgctgcgcgggtcggatgcgccgtacaactcaccgtccggcccaaccataatgctttgtgtactgcccatcgcctctttcagcgccactttctgaccttttgcttccagcagcttgagcgtatccgggctaaaccctttttcgacacgcagctcgtccggcaaccactgatggtggaaacgcggcgcattggtcgcttcggcgacgttcaagccataatcgatgctattcaccaccatttgcagcactgtagtgatgatccggctaccgcctgggctaccggtaaccagccaggttttaccgtctttcaccacaatggtcgggctcatgctgctcagcgggcgtttgttcggcccgacggcgttggcatcaccgcccaccagcccgtaaacgttcggtacgcccggtttggcggagaaatcatccatctggttattaagcagaataccgctctcgcccgcgacaatgcccgtaccgaaggtggtgttcagcgtataggtcaccgccaccgcgttaccatctttatccaccacactgtaatgggtagtttgattactctcataaggcgcaagcttgccggggcgaatttcgctggatggcttcgctttattgatatcaatttgatcggcaatagatttggcataggctttattggtcagcgcctgccacggtactttgacaaaatccgggtcgccaagatattcgctgcggtcggcgtaggcgtatttctccgcttctgccatgatttgcatcgcatcggcgctgccaaagccgtatttcttcatatcgaagttttccagaatattgaggatttgtacgatatggatcccgccggaggatggcggtggcatggagtaaacctgatacccgcgataatcgccgcttatcggagtgcgttcgaccgctttataggctgctaaatcttctttagtgatcaagccaccgtttttctgcatctcctgggcgatctgttccgcaatcgtgcctttatagaattcgtccgggccgttttcagcaatcatctccaggctctttgccaggttcgcctgcaccagcgtgtcgccctttttcagcggctcgccctctttccagaagatagctttactgttttcgtgattcggcaacacttcgctaccgtaggttttgagatcgtcagccagcgcgtcgttaacgataaaaccatcgcgtgccagtttaaacgcgggctgcacgactttgttcagcggcatggtgccgtatttatccagcgccaggctgaaacctgctaccgtacccggtgtgccggaagccagatggctagtgagactttttttgctgtccgggttgccctgatcatcgaggaacatatcgcgggtcgctttggcgggtgccatttcgcggaaatcgatagccgtggtattgccatttttgctgcggattaacataaaaccaccaccgcccagattccctgcctgcggatgcgttaccgccagcgcgtagcccaccgccacggcggcatcaacggcattcccgccctccttgagaatatccacccccacctgagtggcagtggcgtccacagacgctaccattccctgtttcgcgcgtaccgggtggaagacatcttcctccacaccatagctgacgggcggcgcaggaggcgcggcggcggcgctaaaacaacttccactgagcagagcagcaatggccacccggcgtaaaaacgtcggttttatcatcgttattctccagagattaaggggcaaccccagctaagcctggtatataactctgaattaatcatcgttttgtcgggaagcgagtaaacttaaaggatatcttcagaggaggatacgcgatgaaacgacttctgattcttacggcactcctgccgtttgtcggctttgcacagcccattaatactctgaacaaccctaaccagccggggtatcagatacccagccagcagcggatgcaaacccagatgcagactcagcaaatccagcaaaaagggatgctgaatcagcaactgaaaacgcaaactcagttgcaacagcagcatttagaaaaccagataaacaataattctcagcgggtgttgcagagtcagccgggggagcgaaatcccgcccggcagcaaatgctgcccaacaccaacggcgggatgttaaacagcaaccgtaatccggatagtagcttgaatcagcagcatatgctgccggagaggagaaacggcgacatgctgaatcagcccagcacgccgcagcctgacattccgttgaaaactattgggccgtaattattgggccgtaaagttcggaccaatcacgtcaatcgcatcggtacagatgcaatccacaccccagcgcagcaactctgctgcgcgctggggtttattgacggtataaaccagaatccgcagtccggcgtctttcaactgcatcactcgcgctttattgagtaacttatgattgagatgaatagagacgcagcccagccgcgcggtcagttcgcgccagtcgtcgcgccactcatccagcaacaaaccgcgcggcagttccggtgccgcctgttgtgcagcttctaaagcatcaatctcaaagctactcagcagcggcggcgtcataccggcccacagctcgcgtgccgccagcgccaccattttgcccgttaatggcccggtgccggtggtgggtttgatttcgatattcgccatcatcccgtgttcgcggcaacgttccgccacctggctaagcaacggtagcggctcacctttaaacattttgctgtaccaactgcccgcatccacgcgcagtaaatcctgccagttcagttcacccgcgacgccccagccgttgctggtacgttcgagattgtcgtcatggagcaggaagatctcgccatctttgcttaacttcgcgtcaaattcgatcatcttatgaccgtattttgccccgacgtcgatactcgccagggtgttttccggggccagcttaccgccgccacgatgagcgacgatgcggggataaggccagttactcatactcgttgtcctgtttcaccatcaaaaagatgcagctgattttccgccagatgcagccacagcgtgctgcctgccgtcgggcgctcctgatgcgccagtcgcaccaccagcttctgctcgccccagcgtccgtgcgccaggttatctgcgccgaggatctccagcgtgtccatcaccatcggtacgccgccttctgcctggctgcttagcgcaatatgttccgggcgaatgccgagagtcattttacgcccggcatactgacggtagccaccgtttagcggcagctcaataccgccgtccagttcgaaatgcgtgccttcgttattcacgcggcctgtcagcaggttcatcgccggactgccgataaaactcgctacaaacaggctggcgggcttttcgtagacttcaactggtgtgccaatctgttcggcaacaccgccgttcatcaccattactcgctgggcgagcgtcatcgcttcaacctgatcgtgagtaacgtagagactagtcgttttcaggcgacggtgcaactgttgcagttcaagacgcatctgcacgcgcagcttggcatcgaggttagagagcggctcatcaaacaggaacaccgccggatcgcgcacaatcgcgcggcccatcgccacacgctggcgctgaccgccggaaagctcgcgcgggcgacgtttgagcagaccgtccagctccagaatgcgcgccgcttctttaacgcgctcggcaatttgctgcttgcccatgccgcgaattttcagcccccacgccatgttttcttcgacactcatatgcggataaagcgcgtagttctggaacaccatcgcaatcccgcgatcttttggctccatttcagtcacgcgctggtcgttgatccagatatcgccttctgtcacccgctccagcccggcaaccatgcgcagcagcgtgcttttcccgcagccagacggcccgaccatcacgataaattcgccatccgccacatcaagggtcagcggtttaatgacctgggttttaccatcccagcttttggttactgcctgtaatttcagtcctgccatcttatttctcactatcgaccaggccgcgcacgaaggcacgctgcatcactaaaacaatcaccaccggagggataagcgttaacaacatcgccaccatcacactgttccattccgtggtgccttcgcctgtagcgatcatccctttgatccctgccacggtggtgccgagatccacatcggtaataatcaacaacggccacaaatactgattccagccgtagataaaggtgatcacaaacagcgccgccagattagttttggagagcggaaaaacgatgtcgcaaaagaagcgcattgggcttgcgccgtcgatccgcgcggcttccaccagctcatccggcagcgtcataaagaactggcggaacaggaaagtagcggtcgcgctggccatcagcggcagcgttaaaccggcgtagctgtcgagcatctgcaggttggcgatgacttccaccgtcgggaagatacgtacttcaaccggcagcatcagggtgataaaaatcatccagaagaagaggttacgtagcggaaaacgaaaccagacaatggcaaatgcgctgagcatgctgacggtaattttgccgagcgtaatgctgaacgccatcacaaagctgttaagcaacatccgccagaacggcgcgctattcgtgcctaccccgttcacccagatgttgtggatgttttccagcagatgtgtgccggggatgagcgtcatcggcgcggcatagacggcctgtttatccagcgtcgccgcgacaaacgccacgtacagcgggaagaggatcaccgcgatcccgaggatcagcatggtatggctgaatatcgtcagccacggacggttctcaatcattggtaacgcaccttgctttcaacatagcggaactgcaccaccgtcagcacgatgacgaggaacatcaacaccacgctctgtgcggcagagctagccagatccagtccggtaaaaccttcgcggtagatcttataaatcagcgtcgtggtggcctgaaccggcccgccggacgtggcggcgtcgatcaccgggaaggtgtcgaagaaggcatacaccaggttcactaccagcaggaagaaactcaccggggcgataagcggcagcgcaatcttaaagaagcggcgaatcggccctgcaccgtcgatggctgcggcttcgatcaagctacggggaatggattgcagcgcggcatagaagaacaggaagttgtagctgatttgcttccatacactggcaaacaccaccagaaacattgcctgaccgctgttttgcgcgtggttccagtcgtagccgaactccgcgagaaaatgggtgatcagcccgcgaccggggttaaacaggaagatccacaatacggcggcaacggcgggagccacggcgtaaggcagcaacattaaggtttgatagaaacggctgccgcgcacgatgtactccaccagcgccgcaaagaacaggcttaccagcaaaccgctgacggtgacaaaggtgctgaattttatcgtcgtccagaaggagtcgagatagtagctgtcatggaacagcgtgacgaagttatccaggccgacaaactggctggagaaaccaaacggatcgacgctttgtaggctgtaccacaacgcttcgcccgcaggccagataaaaaagataacggtgatgatgagctgcggcgcgaccagcagataaggcagccagcggctgcggaacaccggacgggaactactcattacggttgattcctgaactgtgccggatgcgcttcgcttatccggcctacacgcgatgccaggtcagataagcgaaacgcatccgacattacactgattaagacttcgtgcttttctcaaagcggcgcagcaactgatttccacgctcaacggcggtatccagtgcctgctgtggtgtcttcttaccggtccacacgctctccagctcttcatccacaatcacgcggatctgcggcatgttgcccagacgcagccctttggtgaacggcaacggcggcttattcagcatctgacgcgtcgcggtatccgcccctgggtttttctcataaaagccctgctcacgggtcaggtcatacgctgctttggtgattggcagataaccggttttctgatgccactcggcagcgttttctggcttcgcgaggaaatcgaggaacttcgccacaccggtatacgtttctttatctttaccctgcatcacccacaggctggctccgccgataatggcgttttgtggcgcatctttcgcatcggcgtcgtaaggcatcatgcctacgccgtagttaaatttggcgtactcgcgaatgttggcaagagaaccggaagaggcggtggtcatcgcgcaatcaccgttatagaacttctcggtggattcatccttacgaccgacgtagctgaagtcgcccttcttgttcatctcctcgagcatggcgatgtgtttcacctgctccggcttattgaactccagcaccgcgtccgtgccgtcaaagccgttgtttttgctggcaaacggcagaccgttccaggcgctaaagttttccagttggatccagccctgccagccgctggcgtagccgcacttcatgccggaggctttcagtttcgcggcatagtccgccagatcctgccaggttttcggcggctgttccgggtctaatcctgctttcttgaaggcgtctttgttgtaatagagaacgggggtgctgctgttgaatggctgggagagtaagtggcccgttttgctgtcggagtagtaaccactaaccgtcggcacaaactggctctcatcgaactgaatccctgcctctttaaacacgtcatacaccggtttaatggctttgctcgccatcatggtggcggtgccaacttcataaacctgcaaaatagccggcgcgttgccggtacgaaatgcggcaatccccgcgcttaaattctgttcgtagttgcctttataggtcggtacaattttgtaatccgggttttcggcgttaaaacgttgggccagagaatccacctctttacccagttccccttccatagaatgccagaacggaatggtcgtcactgcctgtgcattccccattaacgccagtccgagcgccagtgcactagctgtataatgtaacggtttcatcgtttatctctcttgttgtaccgaatgcgcgaattcacgcgttttatgctcgcggggtaacatgacatgctcgaattacagaaaaataacttttttgttacatttgtaagatagtaaggtgtcagaaagatgacaaggcggtgacggcgtgggtgagggaaaatgggagatggggcacggataagcgggaaaatatagaaggtctgaatcaaactctacagattgctcatcgtttcatgccggatgcggcgtaaacgccttatcaggcctacaagatcgtgcaaattcaacatattgccactcacccagtaggcctgataagcgcagcgcatcaggcaattttacatttgtcacctgtctcaaaggagtcttttgactccctatcaatcaacgtgttattacccgcctaaatacgcacttctcaccgcttcattcgccagcagcgcatcaccagtatcggaaagcactacatggccgttttccagcacgtagccgcgatccgccagctttagcgcctggttggcgttctgctcgacgagaaagatagtcatcccctgctcgcgcagctgctcgatggtgtcgaaaatttgctggatgataatcggcgcaagaccgaggcttggctcatcaagcagtagcaaacgcgggttgctcatcagcgcacgaccaatcgccagcatctgctgttcaccgccggacatggtgcccgcccgctgaatacggcgctcatgcagacgtggaaacagctcatacacccactttatgcgctcctggaactggtcgcgttcagcaaaaaaaccgcccatcgccaggttctcttccaccgtcatccggctgaagacgcgacgcccttccgggacaatcgccaccgcttcgcgcatgattttcgctgtctgccagtcggtaatgtctttatcatcaaacacaattcgcccgctggtggcacgcggatcgccgcataacgtgccgagcaaggtggttttccccgccccgttcgcgccaatcagcgtgacaatctcgccctgattgatatgcaggctcacctcatgcagcgcctggattttgccgtagtgggcgctgactttgtcaaaggacaacatgactttttccatcttatgcctcacctaaataggcacggatcacgtccgggttattacggatctgctccggcgtaccgtttgccagcggcgtcccctgattgaccacgtaaattcggtcgctaattcccatcaccagcttcatatcgtgttcaatcaacaagatagtggtgttgtgatgattgcgcagttcggcaatcagctcatccagctctttcgtctctttcgggttaagacctgccgcaggttcgtcgagcattaaaatctccggctgcgtcaccatgcagcgggcaatctcaagacggcgctggtcaccataggccaggttactcgcctgacggttggcgtgttccagcaaaccaatgcgctcaagccaggtcgcggcgcggtcgagcgcttcgctctgggcgcgacggaaggatggcgttttcaacaggccagagaacagcccggttttcagttgctgatgctgcgccaccagcaggttttcaattaccgtcatttcacggaacagacgcacatgctggaaggtgcgcaccacgcccatgcgggcaatttgctgccccggtaaaccttccaggtgctgatcgcgcagtaaaatggtgccgccggtgggtttgtagaatccggtcagacagttaaaaaccgtggtttttccggcaccgttagggccgattaagctgacgatctcctgcgggtacagttcaagattgacgttgttcaccgccagcaggccgccgaagcgcatcatcaggccgttaacagataataatggctgactcatgcctgctctcctttcgctgcgccgtttttcagcttcagttgcgggcgcgtcatgggcagcaagccctgcggacgccagatcatcatcagcaccatcaaaccaccgagcattaacatgctgtattcgttgaaatcacgcatcaactcgcggctcaccaccagcaaaattgccgccagaatcaccgcaaattggctgcccataccgccgagcaccactatcgccagcacaaacgcgctttcggcaaaggtgaaggattccgggctgacaaagccctgacgcgccgcaaacagcgttccggcaaaaccggcaaacgcggcacttatggtaaaggcagtcagcttgatacgacgcgggcttaagcccaggctacggcaggcgatttcatcttcacgcaacgcttcccacgcacgccccagcggcatccgcagcaggcggttaatgacaaacaggcttagcaccaccagcagcaacgccaccaggtagaggaagatgacacgatcggagggatcgtatttcaggccaaagaaattactgaacgtgtcccagccgccttcacgagcggtacggctgaactcgagtccgaagagtgtcggtttcgggatctgactgattccgttcgggccgccggtaatttcggtgttattgagcagcaatatgcgcacaatttcgccgaaaccgagggtaacgatcgccagatagtcaccgcgcaaacgcagcaccggaaaaccgagcaggaagcccgccgccgctgccattaatccagcaatcggcaggcaggtccagaagcccaagccgtaatagtgattgagcagcgcaaaagtgtaagcgccgatggcgtaaaaaccgccgtaccccagcaccagcagaccagaaagaccaacaaccacgttcagcccgagaccgaggataatgtagatcatggtcagggtggcaatatccaccgtcccgcgactaaccataaacggccacgccaccgcaagcaccaacagcgccacgaggaacagtttctgcttcaccgtggagccatcaatggcgggcagaataaacttcggtccggaaacgcttttcaaccctttctggaaagccggtcgcaaaagctggaagaaaaagaccaccgccgtgccgataaacacccactgccaacggacatcgctagccgtgtcgaccaccagtttggtgccatccagctccagttgcacgcccataaagacgcccgccagcacaaagaacatcgcggcagagagcagcgccattgcaatatgcatcggtttcatactttctctacctccgggcgacccagaataccggtcggcatcaccagcagcaccagaatcagcagggcgaaactgaccacatctttatattccgtactcagataggcagaagagagcgcctccgcaatccccagaatcaggccgccaatcatcgctcccggaatgctgccaatcccaccgagcaccgccgcggtaaaggctttcatcccggccataaagccgatgtaggggttaatgacgccgtagaactgaccgagcagcacacccgccaccgccgccatcgccgcgccaatcacaaaggtcagcgcaatcacccggtcggtgttaatgccaagcagactcgccattttcagatcttccgcgcaggcacgacacgcgcgacccatgcgggaatagcgaatgaaaatcgtcagcgccagcatggcgaggaaggtaacaatccagatcaccgcctgcatggtggtaatagaggcagagaagttttcgctatgccccaccacccactgaccgttaaacaggctcggcagcgccacgtcgcggctaccttcggtcaggctgacgtagttttgcaggaagatggacataccgattgcagagatgagtgcaatcaggcgcttagagttacgcaccgggcggtaagccacccgttcgatactccagccgtaggcgctggcaatgacgattgcgccgacgaatcccgcagctaccagcagccagccggtatcaatgcccatcatcatcagcgcggcgatgatcataaaactgacgtagctgccaatcatataaacctcgccgtgggcgaagttgatcatgccgataatgccgtaaaccatggtgtagccgatggctatcagcgcgtaggtactgcccagcgtgacgccgttaaacatctgctgcaagaaatacaaaaactgctcagacataaggtaacctttctaaacccgcccgcattttacgggcggtgggatgatcacttggctgccgtggaactaccgtcggcgtgccactggaagacaccaaaatcaaatcccttaagatcgcctttttcatcccagttcagcggcccaatcacggtgtttgcaccgttagcttttaaatctttcaccagcgccagcggctcatcgctgccggtacgctcaagggcagtcgccagagattgcaccgccgcgtaggtgatccagacataaggcccggacggatctttcttgtctgctttcagcgcatcaacgatgccctggtttgccggatcctggtcatagcgttttggcatagtgaccaacatgccttcggcggcatcaccggcaatgttgctcaagctcgcattacccacaccttccggccccataaactgggttttcaggccaacggaacgggcctggcgcagcatctgccccatttccgggtagtaaccgccgtagtaaacgaagtcgatgttttcttttttcaggcgggcgatcagcgcggagaaatctttctccccggcggtaataccgtcgaagaagacgacgttggcgttagccgctttcagcccgtcctgcacgctacgcgccagcccttcgccatactgttgtttgtcgtgaatgatggcgatgcgctggggcttcaccgtctcaagaatgtattttgccgccgttggcccctgggaagagtccagcccggcagtacgcataatgtgttgataaccgcgttgggtcagctccgggttggtcgctcccgggctgatcatcagaataccttcgtcttcatagatatcactcgcaggctgggtagaagaagaacacagatgaccaataacgtatttaatgccgtcattaacgattttgttggcgaccgcaacggcttgtttcgggtcgcatgcgtcgtcatattccacgccaaccagtttatcgcccttaattccccctttggcattaatgtctttaattgcctgacgcgcgccgttaaattccatatcgccccactgggcaatcgggccggacatcgcgccgacaacggcgactttaatatcgtcagccatagcggtgtgactaattgccagtgcaatcatccctgcgatgatagttttcgcattccgtttcatagtcaaaaatccccattcgtgatgttgtgttgctttgtttttatgtgttaacaaatcagactgttctttttttatactgcactgtttttgcctgtctgattaaggggttagcgcagtattttgtgataatagcgattaaaatccctatttttcagtcgattaagaacagataatattctgaatttattgatagataaacagaaaaaagtgcctttgtcagcataaaataacggcacaaagggcggaataattcactatcattcaggggattatgctggacatttttcattctctaatgttttaattttgtaattattgctgttaaaaaattaatcacctgccaaaagaaataaaaaagagaaagcctccgattaaattatttcgctacactggttccacttttgtgatttacacgggttacccatgaagctgaccatcattcgattagaaaaatttagcgaccaagaccggattgacctgcaaaagatctggccggagtattccccttccagcttacaggttgacgataaccaccgtatctacgccgcgcgttttaacgagcgcctgctcgctgccgtgcgggtaaccttaagcggcaccgagggagcactggattccctgcgcgtgcgggaagtcacccgccgtcgcggtgtggggcaatatctgctggaagaggttttgcgtaacaatcctggcgttagttgctggtggatggcggatgcaggcgtggaagatcgcggtgtgatgacggcgtttatgcaggcgctggggtttacggcacaacagggcggctgggagaagtgttaatcgtcaagtttgatttcaaaagtgatattgcctgatgcgctacgcttatcaggcctacaatgtgtgttgcaatttactgatttctttggatcttgtaggccggataaggcgtttacgccgcatccggcatgaagcaacgtactcgatattagcaatttggcggcaacccaaagttgccgattaatgattacttcgcatcggtcgccgtgccgttggcgtgccagtcaaatacgccgaactcaaagcctttcagatcgcctttctcatcccaggtcagcggtcccattacggtatccacggagttcgctttcaggtatttggcgatttcagccggatcgtcagactgattcaggcccgcctgcaaagattgcagcgcggcgtaggtggtccaaacgaatgcgccacttgggtcctgttttttcgctttgatcgcgtcaacaatgggtttgttcgccggaacctgatcgtagttcttcggcttggtcaccagcagcccttccgcactttcgcccgcaatgttagacaggctaacgttagccacaccttccggccccataaactgagttttcagccctgccgcgcgtgcctgacgcaggatttgccccatttccgggtgataaccgccgtagtaaacgaagtcgatattctcttttttcagacgcgccaccagcgtactgaaatctttttccccggcggtgatgccatcaaagaacaccacgtttgcattgcctttcttcaggccgtcctgcaccgctcgcgccagaccttcgccgtattgctgtttgtcgtgaacgatagcaatacgctgcggtttcactttctcaagaatatatttcgccgccgtcggcccctggtcggagtccaggccggtggtgcgcaggatcagctgatagccacgggcggtcagctccggcgcggttgccgctggggtgatcattaaaatgccttcgtcttcgtagatgtcagacgcaggctgcgtactactagaacagaggtgaccaatcacatatttaatgccgtcgttaacgactttgttcgccaccgcaaccgcctgtttcgggtcacaggcatcgtcatattttacgatttgcagtttgttgcctttaatgccgcctttagcgttgatatccgcaaccgcctgctctgcgccggtaaactcctggtcaccgtactgcgcaaccggaccggacattgcgcccacgaccgcgactttaatatcttctgccagagccatattgctgaatgccagcgcgatacatcctgccagtaacgctttaccctttatgttcatcctgagaatccccattcttctggttattacgtgtgttgtgatgttgtttttcagcactttatttcgttttatgcatgactacccgtgctttagcagcatactctgctaaaacatacccgatttttatgatattggaatagctattttgacagtttattaacaatctgcgtggggattggcgttttgccggaggggaaattgattattacagaggcccaaaaaacaaaaaccccggactctcatccagggttctctgcttaatagcggaaattacgcttcaatggcagcacgcaattttttcatcgcgttcttttccagctggcgtacacgctcagcggaaacgccgtaacggtcagccagttcctgcaacgtggacttgttgtcttcgtccagccagcgcgcacggatgatgtcctggctgcgttcgtccagaccctgcatcgcgtcggtcagacggtttgccgcctgctcttcccagttatcatcttcaatgccgtcggcaaagttagaacttttatcctgcagatagagcaccggagccatcggctggctgtcggaatcgtcgtcggaagacaggtcaaaggtcatgtcctgtgccgccatacgactttccatctcacgtacgtctttgctggttacgcccagttcacgggccaccatttcgacttcatcctggttaaaccagcccagacgctgcttggttttacgcaggttgaagaacagtttgcgctgcgctttggtggtcgcaactttgacgatacgccagttacgcagaacgtattcgtggatctctgctttgatccagtgaacggcgaaggagaccaggcgcacacccacttccgggttgaaacggcgcactgctttcatcaggccgatgttaccttcctgaatcaaatccgcctgtggcaggccatagcccgcataattacgagcaatatgaacaacaaaccgcaggtgagacaggatcagcgttttagctgcttccagatcgccatggtaatgcagcttttcagccagcgcccgctcctcgtcagcgctcaacatcggccacgcgttagctgcccggatgtaggaatccaggttgccaactggggctaaagctaaactttgcattttgtcagtcattcaaatcctctcaatcgatatcttctggcgcttcagtggtagcaacaactgtgccagagcttaagagcaacgaggttatcattcactgttttatcagaccgtgattttatccacaagttcaatgcaagcttgtgaataaattacgcacaaaatgtgacatagagatgaaataccgggaagagacaacggggtctctttccctgctacggaacccattgcagggaaagagtataacacgcttttattattcaggcgtaaagtggcgtaaatgttgtaccgtggcaagccacgctgccacccagccaatcatgctgcataccagcagcaatagcaggcattcatcgaaacttaagccattgatatcaaacttcgttccgaaaacctgtgccacttccgcaaccgcgctactcaatcgcagcaccagaatttcactcaaaattaaactcaacaatgcgccagaaaatcccagcagtgcgccaccatacaggaacgggcgcaggatgaatccatctgtcgcaccaatcagtttctgtacgttaatggagtcacggcgagcaaagatactcagacgcacactgttaccgatgacgaggaacacggccgccaccatcaacacgccgatcatcgcgctaacgcgcccgaccagcccggtcaacgccgccagacgggcaaaccagctgtcatccatccgcacttcgtcaatgccgttaatctgcgtgatacgatcacgcagcgtattcagactttccgtcccctggaaatcgagtttcgggatcaccaccgccactgccggaagcgggttttcttccagcatatccagcgcaccaccaaaaccagaccagttacggaactcacccagtgcgtcttcacgagaaagatagttcactttctccacgccttgctcggcctgcaactgtgccaccacgcccgcagcagcgtcatcgtccagcgttttttgcagataaacagtgatttgcggactcggataatactgcgtcgccgcctggttaacgtttttgtacaccatataacagacgctgggcagcgtcagagaaatggcgataaccatcaccgttaaaaacgtggcgaacggtttgcttttcagatcctgcaatgcgccgtggaaggcatagcgcacctgttcgttgaaaacgttggttttgcgatttaccggttttgggctggatttcgcgcgttttggtgcgttacgaccgccgtcgccactgccgccgacgcttttacggaagcgatcaagacgcccgccaaactgccgaatatgattgattgcatcgcgcttattcatggcccacgcctccatgcaagtgaccatcgctcagggtgagcatgcgataggaacgccggctgatcaggttgatgtcgtgcgttgccatcaatacggttaccccaacgcggttaaactcttcaaacagacgtaaaatgccttcgctcagcgcgtcgtccaggttaccagtcggttcgtccgccagcagtaccgcgggcttgttcaccaccgcgcgggcaatgccaacacgctgttgttcaccgccgctaagctgaatagggaagttcttcgctttgtccagtagcccgactttatccagcgccgcgctcacccggcgacgaatatcgtcaccgctggcaccggcgataatcagcgggatcgccacgttatcgtagacagtacggtccatcagtagatggtgatcctggaaaatcatgccaatctggcggcgcagaaacggaacttcacggtttttcagacgcgtgatgtcatggccgctaaaccagattttcccggcgctgggccgctcaatcccacagatcagcttcaggagggtacttttccctgcgccggaatgaccggtcagaaacgccatctcacccggctgcatatggaacgtaacgccctgcagcgcctgtctcccaccgagataagccttgctgacatgttcaaagcgaatcattgttaatcctctcgggcaaaaagtgcctctataaagtcgtccgccttaaacggacgcaaatcctcaatacgttcgccgacaccaatgtagcggatagggataccaaactggtcagccacgctgaaaattaccccgcctttcgccgtgccgtccagtttcgttagcgtgatgccggttaagccaacggcttcatggaacagtttggcctggcttaccgcgttctgcccggtgctggcatcaatagtcagcataacttcatgcggcgcttcaacgtcgagtttcttcatcacgcggacgattttcttcaactcttccatcaggtggcttttgttctgcaggcgtccggctgtatcggcaatcaggacgtcgatattacgcgctttagctgcctgaatggcgtcgaagataacagaggcggaatccgccccggtatgctgggcaatcaccggaatattgttgcgctgaccccagacctgaagctgttcaaccgcagctgcacggaaagtatcacccgccgccagcatcacgcttttaccctgctgctcaaactgacgcgccagcttaccaatcgtcgtggttttacccacaccgttgacgcccaccatcaggatcacaaacggcgctttgccttcaacattcagcggctcatcgactttcgccagaatctcgcccatctcttctttcagcaggccatagagcgcctcggcgtcacgaagctgcttgcgggatgcgccttccgtcagattggtgataattttacgtgtggtttccacacccacatcggcgatcaaaagctgctcttccagctcctcaaacagatcatcgtcgatttttttaccgcggaacaggctgataaatccggaaccgagattttctttggtttttaacaggctgcgtttcaggcgcgcgaaaaaaccttctttggtcggtttttcctgctcctgagcgatttcttccaccggctgctcttcttctgccggaggaaccaccatcaccgcctcttctgccgcttcggcagccagcgccgtttccagctcttcgtcggtaatttcttctttagccgcttcttcttccgccgcttcgacaatctctacggtttccgcttcagcctgccactcttctgggctaaccgcttcggcgttgacgtcttccggcaacggcagctcttcacgttcgatagccactggctccggcgtttcttctacgaccggttccggctgtgcaacgacttccgcttcaggctgcgctttttcactttcagcaacctgttcagtgacttccacaacgtcggcagcaaaagtttccgcctcggcttcagtatgcgcttgcggctgctcttcaacggcttgttcagaggccttcacaggctcttgcgcctgaacgatttcttctacaaccggttgttcattctgaacttctgtctctttttccggggtctgctctttttgaccaaagcccagccaggaaaaaaagccacgttttttttctttcgccatttgcgactacactcctcgctgttgcttcatggcacagcgttaacgctatgtacatagcagctaaaaaaatgatgaaatagtctatcacttaacttaattcacatcaccgcctgcaagtatgtgttatctggcggattgagcaatttatcatgaaaaaaccgaatcattccggcagcggccaaatccgcattattggcgggcagtggcgaggccgtaaactcccggttcctgatagcccaggtctgcgccccaccaccgaccgcgtacgcgaaacgttgtttaactggctggctccggtcattgttgacgcccaatgtctggattgcttcgccgggagcggcgcgctggggctggaagcgttaagccgctacgctgcgggggcaacgttgattgagatggatcgcgcggtttctcagcagttaattaagaatctggcgacactaaaagcaggcaatgcacgcgtggtgaacagcaacgcgatgagtttcctggcgcaaaaaggtacaccgcataatatcgtgtttgtcgatccaccgttccgccgtggcttgttagaagagacgataaatttactggaagataacggctggctggctgacgaagccctgatttatgtcgaaagcgaagtcgaaaacggtctgcccactgttccagcaaactggagtttacatcgggaaaaagtggcgggtcaggtggcttatcggctgtatcaacgcgaagcacaaggagaaagtgatgctgattaatattggtcgtttgttaatgctctgcgtttggggatttttaatcctcaacctggtgcatcccttcccacgcccgctgaatatcttcgttaacgtggcgctgatttttaccgtgctgatgcatggtatgcagctggcgctattgaaatccactttaccgaaagatggcccgcagatgaccaccgccgaaaaggtacggattttccttttcggcgtgtttgaactgctggcctggcagaagaaatttaaagttaaaaaataaccttattgttcgcctacaaagctgacaaagcgcgttcctttatagctcagcgtacctttatcgcccactgtcagggcgtggtactgctgggcgtcgaggcgaaacgtctgctccattcctccgctttgcggtttgaagcttgcctcatagcgtatactggtgcctgccggagtcacttcctgctggcggctacggcgatcgttaatcggtttttcccgcttgttgctcaccaccaccagcttttgctggagcggagccatatcattatcagctttttcccgtcgctgttgcataaaacgaaagcttgcggcgacgacaattaagccaatgataacaataaagaaaagaggtggtttgctcatctttatccctcatcggaaaatgcggaaataagcataccctgccagttatggtgttgtcatccgtccaccctcgccactaaactggaagcaagaccgtaggcattccgcttacgaaaaaataacgaattcaaggaactaagatgctttggagctttatcgctgtctgtctttccgcatggctatctgtggatgcaagctatcgtgggccaacctggcaacgctgggtgtttaaaccgttaacccttcttctcctgctgttactggcctggcaagcgccgatgttcgacgccattagctatctggtgctggcagggctgtgcgccagtctgctgggcgatgcgctaaccctgttgccacgtcaacgtctgatgtacgccatcggcgcgtttttcctcagccacctgctgtacaccatctatttcgccagtcagatgacgctctctttcttctggcctctaccactggtgctgctggttctgggtgcgctgttactggcgattatctggacgcgcctggaagagtaccgttggcctatctgcacgtttatcggcatgacgctggtgatggtgtggctggcaggtgaactgtggttcttccgtccgaccgctccggcgctctctgcgtttgttggcgctagcttgctgtttatcagtaactttgtctggctggggagccactatcgccgacgcttccgtgcggataacgcgattgctgcggcctgctactttgccggtcacttcctgatcgtccgcagcctgtatctctgataaaacttgactctggagtcgactccagagtgtatccttcggttaatgagaaaaaacttaaccggaggatgccatgagcactcctgacaatcacggcaagaaagcccctcaatttgctgcgttcaaaccgctaaccacggtacagaacgccaacgactgttgctgcgacggcgcatgttccagcacgccaactctctctgaaaacgtctccggcacccgctatagctggaaagtcagcggcatggactgcgccgcctgtgcgcgcaaggtagaaaatgccgtgcgccagcttgcaggcgtgaatcaggtgcaggtgttgttcgccaccgaaaaactggtggtcgatgccgacaatgacattcgtgcacaagttgaatctgcgctgcaaaaagcaggctattccctgcgcgatgaacaggccgccgaagaaccgcaagcaagtcgcctgaaagagaatctgccgctgattacgctaatcgtgatgatggcaatcagctggggtctggagcagttcaatcatccgttcgggcaactggcgtttatcgcgaccacgctggttgggctgtacccgattgctcgtcaggcattacggttgatcaaatccggcagctacttcgccattgaaaccttaatgagcgtagccgctattggtgcactgtttattggcgcaacggctgaagctgcgatggtgttgctgctgtttttgattggtgaacgactggaaggctgggccgccagccgcgcgcgtcagggcgttagcgcgttaatggcgctgaaaccagaaaccgccacgcgcctgcgtaagggtgagcgggaagaggtggcgattaacagcctgcgccctggcgatgtgattgaagtcgccgcaggtgggcgtttgcctgccgacggtaaactgctcagtccgtttgccagttttgatgaaagcgccctgaccggcgaatccattccggtggagcgcgcaacgggcgataaagtccctgctggtgccaccagcgtagaccgtctggtgacgttggaagtgctgagtgaaccgggagccagcgccattgaccggattctgaaactgatcgaagaagccgaagagcgtcgcgctcccattgagcggtttatcgaccgtttcagccgtatctatacgcccgcgattatggccgtcgctctgctggtgacgctggtgccaccgctgctgtttgccgccagctggcaggagtggatttataaagggctgacgctgctgctgattggctgcccgtgtgcgttagttatcagtacgcctgcggcgattacctccgggctggcggcggcagcgcgtcgtggggcgttgattaaaggcggagcggcgctggaacagctgggtcgtgttactcaggtggcgtttgataaaaccggtacgctgaccgtcggtaaaccgcgcgttaccgcgattcatccggcaacgggtattagtgaatctgaactgctgacactggcggcggcggtcgagcaaggcgcgacgcatccactggcgcaagccatcgtacgcgaagcacaggttgctgaactcgccattcccaccgccgaaagtcagcgggcgctggtcgggtctggcattgaagcgcaggttaacggtgagcgcgtattgatttgcgctgccgggaaacatcccgctgatgcatttactggtttaattaacgaactggaaagcgccgggcaaacggtagtgctggtagtacgtaacgatgacgtgcttggtgtcattgcgttacaggataccctgcgcgccgatgctgcaactgccatcagtgaactgaacgcgctgggcgtcaaaggggtgatcctcaccggcgataatccacgcgcagcggcggcaattgccggggagctggggctggagtttaaagcgggcctgttgccggaagataaagtcaaagcggtgaccgagctgaatcaacatgcgccgctggcgatggtcggtgacggtattaacgacgcgccagcgatgaaagctgccgccatcgggattgcaatgggtagcggcacagacgtggcgctggaaaccgccgacgcagcattaacccataaccacctgcgcggcctggtgcaaatgattgaactggcacgcgccactcacgccaatatccgccagaacatcactattgcgctggggctgaaagggatcttcctcgtcaccacgctgttagggatgaccgggttgtggctggcagtgctggcagatacgggggcgacggtgctggtgacagcgaatgcgttaagattgttgcgcaggagataaggcaaaccgatcgcaacattgagcgcgatcggtcccctcgcccctctggggagagggttagggtgaggggaaaaggcggcatcgaagccaatcagcccctatcaaccgcctttacgaatcaaataacgataaggcagtccatccgtctctttagcaaccagttcgtgttccataaaggtacaaaacccaggaatatcgcgggtagtggccggatcgtcggcgataatcagcaacgtttcgccaggctgcatattgcgcacggttttgcgcaccatcatcaccggttccgggcagcgcaggccaagcgcgtcgagtgtgtggtcagggctggaaaagagatcggtcattttcttctcatcacttaaaaaaacggcgctagtttacgccctgtgagtccgtaagcaaactaggttaacgattgcgtgaaaattaaccattgcattgtcaacgtaaagcagtatcatgcggcggctcgaaaaaagggtaagcacgttattatgttaaggtaacagacgtgtcgtacgtattgggttccctcaccccaatggttaatcaaaaaggtacaatatgaacgttttcagccaaactcaacgctataaggcgttgttctggttaagcttatttcatctgctggtgatcacctccagtaactatctggttcagcttcccgtctccattttgggtttccataccacctggggcgcgtttagctttccgtttatttttcttgctaccgacctgaccgtgcgtatttttggcgcaccgctggcccgacgcattatcttcgcggtaatgatccctgcgttattaatctcctacgtcatcagcagcctattctatatgggttcctggcagggattcggcgcactcgcccacttcaacctgtttgtcgcccgtatcgccaccgccagtttcatggcctacgcgctggggcaaatcctcgacgtgcacgtttttaaccgcctgcgtcagagtcgccgctggtggctggcaccgacagcgtccacactgttcggtaacgtcagcgacacgctggcctttttcttcattgccttctggcgtagcccggatgcctttatggctgaacactggatggaaatcgcgctggtcgattactgtttcaaagtgttaatcagtatcgttttcttcctgccaatgtatggcgtattactcaatatgctgttgaaaagactggcagataaatccgaaatcaacgctttgcaggcgagttaaaggttcgttatcagagttgtgataagatggatgaatgagccgttatggccgtttatcgaaaggaagaagtcaatgcgcaatctggttaaatatgtcggaattggcctgctggttatggggcttgcggcctgtgatgataaagacactaacgctacggcgcagggtagcgtcgcggaaagtaacgctaccgggaatcccgtcaacctgcttgatggcaagttaagtttcagcctgccagcggatatgaccgaccagagcggtaagctgggaacgcaggccaataacatgcatgtctggtccgacgccaccgggcagaaagcagtcatcgtcatcatgggcgatgatccgaaagaagatctggcggtgctggcgaagcgtctggaagatcagcaacgtagccgcgatccgcagctgcaagtggtaaccaataaagccattgagctgaaaggtcacaaaatgcagcagttagacagtattatctccgcgaaaggccagacggcgtactcttccgttattctgggtaacgtgggtaatcaactgctgaccatgcaaattacgctgcccgctgacgatcagcaaaaagcgcagaccaccgcagaaaacatcattaatacgctggttattcagtaagttttaagaactactggcggcctcagggacgtgttccggaggccgtttttttaatcgccacgtcagtaataacgcgattgcgaccagtcccgccgccgccagataaatcaccggtacgcccgcccagctcatcaccagcccagccagtggtccagtcacgccaaggcttaaatccataaatacggtgtaagttgccagcgccgccccctgattttgctgcggaaccgcttttaccgccactacacccaatgccgggaacaccaggctaaacccggcccccgccagtaagacgccgattttcgccatccacggcatagtcgccacgccaaccagtagcaggccgattatctcaacgctaaagcaaatcatcgctacgtttaagccaccgatacggttaatgccgttagggaataacaaacgcgtaccgacaaacgcacagctaaacagcgtcagcgcgaaagccgcaccgtcccaacctttagcgtcataaaacagcgtgataaaggtggcgatgacgccaaatccggcggaagccagtgccagcgccataccgtacagccagacgcgcccaagcaccgcgcgaaacggcagcggtttgcctttactggcttttaccgtcggacgcgggatcgccaacaaaatggccaccagcgccacgcccataatgattaacgctaacgcctgcaagccgccccagtgataaaacacgacgcctaacggcgcacccatcgccatcgccccgtaagtgacaatgccgttccagctaatcacccgcccgatatgcaggctgccaaccacgccaacgccccatagggtgcttcccgttccggcaaaactttgcccaatcccaaggatgacgcgccccaggcaaagtaataacaggctgatgacaggcagactggcggttaatcctgccgtcagataccccagaccgctcaaaaagcagccgcataaaccgaagacgacaatctttttgggtcccaggctatcggcgtaacgtccggcatgagggcggctcagcaaggtggcgaaatattgcaggctgataaccaatcctgcccagaaggcgctaaagcccatcacatcatggacatagcccggtaatacagcgagcggcaacccgatggtgaggtagctggcgaagttaaacatgactatagagacaatgcgcaaattcaggcgcaatccgtttagcgcgggttcggctacgggttcgggcatgaggatcaccacatttttacaacagtgtttcatttttaccacgtgctgacgtgaaaatcagcagtaagaatcagaatattgctggcgtgactcccgctacacttaatacaaaaagtcacaaggaagccccaatggaaacccctcaacccgataaaacgggcatgcacattctgctcaagctggccagcctggtagtgatcctcgcgggcattcacgcagcggcagatatcattgtgcagctgttactggcgctgttttttgccatcgtcctcaacccgctcgtcacctggtttattcgtcggggagtacaacgccccgttgccattacgattgtagtggtggtgatgctgatcgcactaaccgcgctggtcggcgtactggcggcaagctttaacgaatttatctctatgctgccgaagtttaataaggagctgacgcgcaaactttttaaattgcaggagatgttgccttttcttaatttgcatatgagcccggagcgaatgctgcagcggatggacagcgaaaaagtggttaccttcaccacagcgctaatgaccgggctttccggggcaatggcgagcgtgcttttgctggtgatgaccgtagtttttatgctgtttgaagtgcgccacgtcccttacaaaatgcgttttgcgctgaataatccacagattcacatcgcgggattacaccgcgcacttaaaggcgttagccactatcttgcattgaagacgctactcagtttatggacaggtgtcatcgtctggctggggctggagctgatgggggtgcagtttgcgctgatgtgggcagtactggcgtttttgctcaactacgtgcccaatatcggcgcggtaatttccgccgtaccgccaatgattcaggtgctgctgtttaatggtgtttacgaatgtattctggtcggcgcattgtttttagtggtccatatggtcatcggcaatattttagaaccacggatgatgggccatcgcctggggatgtccaccatggtggtatttcttagtttgttaatttggggatggctgctcggcccggtagggatgctacttagcgtgccattaaccagcgtgtgtaaaatctggatggaaaccaccaaaggcggtagcaaactggcgattttactggggccgggcagaccgaaaagtcggttaccgggatgaggcgacaagtgatacgatacgcactttcattttccattaaacgttggccctgatatgtatcggatagttctggggaaagttagcaccttaagcgcagctccactgccaccgggtttacgcgagcaagcaccgcaaggtccacgacgcgaacgctggctggcggggcgtgcattgcttagccacacgctttccccgctaccggagatcatctatggcgaacaaggcaaacctgcatttgcgccggaaatgccgctatggttcaacttaagccatagcggtgacgatatcgccctgctgttgagtgatgaaggcgaagtcggctgcgatatcgaagtgattcgcccgcgcgccaactggcgctggctggcgaacgccgtattcagcctcggggaacacgctgagatggacgccgtgcatcctgatcagcaactggaaatgttctggcgcatctggacgcgcaaagaagccatcgttaaacagcgtggcggcagcgcctggcaaatcgtcagcgtagacagcacctatcactccagcctgagtgtcagccattgtcagcttgaaaatttaagccttgcgatctgcacccctactccctttacgctcaccgccgacagtgtgcaatggatcgatagtgttaactgatccgcccacccgactgcccatctattgatccagaacaggtaatcagtatgacgaatacttaaaatcgtcatacttatttccgccatctattttaatccattggggttaccatgctctccacactccgccgcactctatttgcgctgctggcttgtgcgtcttttatcgtccatgccgctgcaccagatgaaatcaccaccgcctggccggtgaatgtcgggccactaaacccgcacctttacacgcctaaccagatgttcgcccagagcatggtttatgaaccattggtgaaatatcaggcagacggtagcgtgatcccgtggctggcaaaaagctggactcatagtgaagatggtaaaacctggaccttcaccctgcgtgatgacgtgaaattctccaacggtgaaccgttcgatgccgaggcggcggcagaaaacttccgcgcagtgctcgataaccgtcaacgtcacgcctggctggagctggcaaaccagattgttgatgttaaagcactcagtaaaacagagctgcaaattaccctgaaaagcgcctactatcctttcctgcaagaactggccctgccccgtcctttccgttttatcgctcccagccagtttaaaaaccatgaaaccatgaacggaattaaagcgccgattggcaccggaccgtggattttgcaggaaagcaaactgaatcagtacgatgtcttcgtccgtaacgaaaactactggggcgaaaagccagcgattaaaaagatcacctttaacgtcatcccggacccgactacccgcgcggtggcgtttgaaactggcgatatcgacctgctgtacggaaacgaagggttattaccgctcgataccttcgcccgctttagccagaatccggcttaccacacccaactgagtcagccgatcgaaaccgtgatgctggcgctcaataccgccaaagcccccaccaacgagctggcagtacgtgaagctcttaattacgcggtaaacaaaaaaagcctgattgataacgcgttgtatggcacccagcaggtcgccgacaccctgtttgccccttctgtgccctacgccaacctcggcctgaaaccgagccagtacgatccgcaaaaagcgaaagcgttgctggaaaaagccggttggacgctgcctgcgggcaaagacatccgcgagaaaaatggtcagccgctgcgcattgaacttagcttcatcggcaccgatgcgttaagcaaaagcatggcggaaatcattcaggctgatatgcgccagattggcgcagatgtcagcctgattggcgaagaagagagcagtatctatgctcgtcagcgcgacggtcgttttggcatgattttccaccgcacctggggcgcgccatatgatccacacgccttcctcagtagtatgcgcgtaccgagtcacgctgacttccaggcacagcaaggattagccgacaaaccgctgattgataaagagatcggcgaagtgctggcgacccatgacgaaacgcaacgtcaggcgctgtatcgcgacattctgacccgtctgcatgacgaggcggtttatctgcctatcagttacatcagtatgatggtggtaagtaaaccggagctgggtaacatcccctacgcgccgatcgccaccgaaattccgttcgaacagattaaaccggtgaaaccttaatgttgcgttacgtattacgccgctttctgctgctgatcccgatggtgctcgccgccagcgtgatcatttttctgatgctgcgcctcggtaccggcgacccggcgctcgattatttgcgtctgtctaacctgccgccgacgccggagatgctggcctctacccgcaccatgctgggactggatcagccgctgtacgtccagtacggcacctggttgtggaaggcgctgcatcttgactttggtatcagtttcgccagccaacgcccggtactggacgatatgctgaacttcctgcccgccacgctggaacttgcaggtgcggcgctggtattaattctgctcacttccgtaccgctcggtatctgggcggcgcgccatcgcgaccgtctgccggatttcgccgtacgtttcatcgcgtttcttggcgtgagcatgcctaacttctggctggcgtttttactggtgatggcgtttagcgtgtatctgcaatggctacccgcgatgggttacggcggctggcagcacatcattttgcctgcggtttccattgcctttatgagcctggcgattaacgcgcgtttactgcgcgccagtatgctggacgtcgccggtcagcgtcacgtcacctgggcgcgtctgcgcggcctgaacgacaaacagaccgaacgtcgccacatcctgcgcaatgccagcctgccgatgatcaccgccgtggggatgcatatcggcgaactgattggcgggacgatgattatcgaaaacatctttgcctggccgggcgtcgggcgctatgcggtgagcgcgatttttaaccgtgactatccggtgatccagtgctttacgctgatgatggtggtggtttttgtggtctgtaatttgattgtcgatttgctcaacgccgcgctggacccgcgcattcgtcgtcatgaaggagcgcacgcgtgaactttttcctctcttcccgctggagcgtacgcctggcgctgatcattatcgccctgctggcgctgattgcgctcaccagccagtggtggctgccgtatgacccacaggcgattgatttgccgagccgcctgcttagcccggatgcgcagcactggctgggcaccgatcacttaggtcgcgatattttcagccggctgatggcagcgacccgcgtgagcctcggtagcgtaatggcctgcctgctgctggtgctgacattagggctggttattggcggcagcgccgggttgattggcgggcgcgttgatcaggccaccatgcgcgtcgccgatatgtttatgaccttcccgaccagcattctgagcttctttatggttggcgtgctcggcaccgggctgaccaacgtaattatcgccatcgccctgagccactgggcgtggtatgcacgcatggtgcgcagcctggtgattagtctacgccaacgcgagtttgtgctggcgagtcggctttccggtgcgggccatgtgcgggtgtttgtcgatcatctggcaggcgcggtgatccctagcctgctggtgctggcaacgctggatatcggccatatgatgctgcacgtcgcggggatgtctttccttggcctcggtgtgaccgcgccgaccgccgaatggggcgtgatgattaacgacgcgcgccagtatatctggacccagccgctgcaaatgttctggccggggctggcgctgtttatcagcgtgatggcctttaacctggtgggtgacgcactgcgcgatcatctggaccctcatctggtgacggagcacgcacactaatgccgcaacagattgaactacgtaatatcgcgctacaggccgcgcagccgctggtacacggtgtaagcttaaccctgcaacgcgggcgcgtgctggcgttagtcggcggtagcggcagcgggaaaagtttaacctgcgccgcaacgctgggcattttgcccgctggcgttcgccagacggcgggggaaattttagccgatggcaaaccggttagcccttgcgccctgcgcggcatcaaaattgccaccatcatgcagaacccgcgcagcgcctttaatccactgcacaccatgcacacccacgcgcgggaaacctgcctggcgttagggaaacccgccgatgacgctacgcttaccgctgccatagaagcggtggggctggaaaacgccgcgcgcgtgctgaagctgtacccgttcgagatgagcggcggcatgttgcagcgcatgatgattgcgatggcggtgctgtgtgaaagtccgtttatcatcgccgatgaaccgaccaccgaccttgacgtggtagcacaggcgcgcatcctcgatctgctggaaagcattatgcaaaaacaagcgccgggaatgctgctggtgacccatgatatgggcgttgtggcgcgtctggcggatgacgtggcggtgatgtctgacggtaagattgtcgaacagggcgatgtagaaacgctgtttaacgcccccaaacatacagtgacgcgcagcctggtttccgctcatctcgccctctacggtatggagctggcaagttgacctaatacggtatggagctggcatcatgactttacttaacatctccggcctttcccatcactatgcgcacggtggatttaacggaaaacatcaacatcaggcggtgctgaataacgtttccctgaccctgaaaagcggcgaaaccgtcgccctgctggggcgcagcggctgcgggaaaagtaccctcgcgcggttgctggtgggtttagaaagccccgcgcaggggaatattagctggcgtggcgaaccgctggcgaaactcaatcgcgcccagcgtaaagcgttccgccgcgatattcagatggtatttcaggactccatcagcgccgtgaatccgcgcaaaaccgtgcgcgagatcctgcgtgaaccgatgcgccacctgctaagtctgaaaaaatccgaacaactggcgcgcgccagcgaaatgctgaaggcggtcgatctcgatgacagcgttctcgacaaacgcccaccgcagttaagcggcggccagctccagcgcgtctgcctggctcgcgcgctggcggtcgaaccgaaactactgattctggatgaagccgtttctaaccttgatctcgtgttacaggcgggtgtcattcgcctgctgaaaaagctacaacaacagtttggcaccgcctgcctgttcatcacccacgacttacgcctggtagaacgcttttgccagcgggtaatggttatggacaacggacaaatcgtcgaaacccaggtggtgggagagaaattaaccttttcctctgacgccggacgtgtgctacaaaacgcggtattacccgcattccccgtgcgccgtcgcaccacagaaaaggtttaacgcaaatgcaacgagtcaccatcacgcttgatgacgatttactggagacgctggacagcctgagccagcgtcgtggttataacaaccgttccgaagctatccgcgacattctgcgtagcgccctggcgcaagaggccacccagcagcacggcacgcaaggtttcgcggtgctgagctatgtgtatgaacacgaaaaacgcgacttagccagccgcattgtctccacccagcatcatcaccacgacctctccgtcgccacgctgcatgtgcacatcaaccacgacgactgtctggaaatcgccgtgttgaaaggtgacatgggtgacgtgcagcattttgccgatgacgttatcgcccagcgcggcgtgcggcacgggcatttgcagtgcttgccgaaggaagattgagttacgccattgtcccaatcgtcttcctgaatcgcagcagcgcaatggtgaaaaatgcgccgccaattgccatcagcgtcagaaactgcggccagacgatttcgaatccggcaccccggtagaggatggcctgcgcgaggctaacaaagtgtgtcgtcggcatggtcagcataatgtcctgcaccatctgcggcatactttcgcgcggcgtggaaccaccggaaagcatttgcagcggcagcagcaccagaatcaccagcagccccagttgcggcatactacgcgctatcgtccccataaaaatgccgatactcgtggtggcaaacagactgagcgccacgcccagcataaacagcgggatgctgccttcaatcggtacgcccagtacacctttcaccatcagcaccaggcttaatccgcttaccaccagcaccaccagccccatgctccagatcttcgccatcatgatctcaaacggcgttatcggcatcaccagtaagtgttccaccgtgccgtgttcacgctcgcggatcagcgcgcttccggtcaatacaatcgccagcatggtaatgttgttgatgatcgccatcaccccgccaaaccacgcgggatcgaggttcgggttaaagcgcatccgggtttccaggcttaccaacggttcgctgttatcacggtagcgcgcgacaaagctgttcacttcaccgttgataatattctggatatacccattgccggtaaatgcctggctcatgcgcgtggcatcgacgttcacctgaatatccggctggcgtccggcgaggacatcacgctgaaaattaggcggaatatttatcgcgaaggtatagcgtccggcgtccagtccggcatccatctcatcggcggtgatcatctccggtggcaaaaaccacggacgatagaagctgttaacgatccggttgcttaactggctttgatccatatcggcaatggcgatcggcgcgaggttcaagcttcctggcgtaacggtcgcactgctatacacgctcaccgtaaagctgaagacaatcagcgtcagcatcgctttatcaccgagcagactgcgcaactctttgatacccagattaaaaatattgcgtaaatggcgcatcatccctcctgttttttcagcagcaggatacttaagcccatcaccagcgggatggctatcagtaacgggataaaaagttgccacaaatcagtcagatccagcgctttgctgaacgtcccgcgggcgatagtcagaaaatgactggtcgggtaaacctcgccgatccaacgtccaggcccttccaggctagctaccggatcgatcatcccggaaaactgtgtcgccgggatcaacgtgataatcgccgttccgaaaatggcggcaatctggcttttcataaaggtggagatcagcagccccattccggtggcaatgatgatatacagcagcgccgccagggtgagcgtcaggaaactgcctttatgcggtacgccaaacacaaacacgctcaggccgcagagcaggaaaaagttcagcatccccagcgcgatgtatggcaactgtttaccaagcaaaaattcactacgcgtggtgggggtcacgtaaaggttgataatgctcccaagctctttttcccgcaccacgctaagggcgcttagcatactcgggatcatcatcagcagaagcgggatcaccgccggaacaatcgctggcaggctttttacgtccgggttatagcgatagcgcgtctcaatattcatcagcccgctttggctggcgggtgtgctttgtcggctcgccacatcctgtaaccagctctggtgcatggcctgcacgtaaccttttaccgtttcagcacggctcggcatcgctccgtcgatccagacgccgagttccacaggcgtaccacgcgcgatatcgcgcccgaaattgggcgggatctcaatcgccaccgtgatatcgcccgcacgcatccgacgatcaagctcgtcataactggtgagcggcggctgttcgataaagtaacgggaaccggagaggttgagtgtccacgcctggctactgacggtctggtcgcggtcgagcaccgcaaagcgcaggttttccacatccatactgatgccgtaacccattatcagcatcaggatcaccgttcccatcagcgccagcgtgctacgtactggatcgcgtcgcagttccagcgcttcgcggcggctgtagctaaacagacggcgcaggctaaatccctgacgcggcgcgtgggtggtgtcgtgtaccacgggcggcgcttcggcttcgttgctctgccctgccgcttcctgcaaataggcgataaatgcctcttccagactggcggctccgcgtttctcaaccagttcctgcggtgtaccgctggcaagcacttttccggcgtgcatcagactgatgcggtcgcaacgttccgcttcgttcataaagtgggtggagatgaagatagtcactttgtcctggcggctgagatcgaccatcaactgccagaacatatccctcgccaccggatcgacaccagaagtaggctcatcgaggattaacatctccgggcgatgaatcaccgccaccgccaggctaagccgctggcgaatgccgagcggcaaactctccggcagaatatcttcaacgtcgttgagcttaaaacgctcgctcatttcagccactcttgcgggaatttccgcttccgggatgtgaaacaaacgggcatgtaactcaaggttttgccgcacggtgagttcgttatagaggctaaacgcctggctcatatagcccacccgacggcgggtatcgatatcttttggatcaaccggttgcccgaacagccacgcctcaccttcgctggcgggcagcagtccggtgagcattttcatggtggtggatttaccgcagccgttgctaccaagaaaaccaaaaatctccccgcgtggaatgcggaaattaacgtgatcaacggcaacgaaggaaccaaaacgcatggtcagatcgcgcgcttcgatggcaatctctgcgttttcaggttgatacggtgggatcactaccgcctgatgcgcctggcgttgcgcttgcggtaacagatttataaatgcttcttccagcgtagcgctttgcgtttgctgccgtagctcttcggcgctgccagttgccagcacttctccggcattcatcgctaccagccagtcgaagcgttcggcctcttccatataggcggtggcgaccagcacgctcatattgctctgccgctggcgaatactgtcgatcagatcccagaactgggagcgggagagcgggtcaacccccgttgttggctcatcaaggatcaacagttccgggtcgtggattaacgcgcagcacagcccaagtttttgcttcatcccgccggagagtttccctgccggacgatcgcgaaacggtgctaacccggtgctggtcagcagctcattgattcgcacttcccgctccgctttgtcgtgaccgaacaggcgagcgaaaaaatcgacgttttcatacacgctcaaggtgtggtagaggtttttgcccagcccctgcggcatccaggcgatgcgcgggcagacgtcgcggcgatgcttcgggtcgcgcatatcgccgcccagcaccatcacattgccctgttcaatgacgcgggcaccggaaatcaagctcaacaagctgctcttcccgacgccgtccgggccaatcagcccgaccatacagcgggccggaatatcgagagtgatattgttcagcgcaacggtttttccataatgctggctcacgcccgccagttgcgcgacaggcgggacgggaaccagttccagatgcgtcattgcggcaacctcaccacgaggtcgtcaggccacggaagttcttcattcacccgcacccacgctacgcccggcaaaccggttttgacatattccagatgctgctggagtaattccggtgggatacgcgctttgacgcggaacatcagtttcagccgttcatcgctggtttcgacggtttttggcgtgaactgggcgacactggcgacaaaactgatggttgcaggaatacgcagatctggcgcggcatcgaggatcagccgggcttcaccgcccagtttcagcgtgcccgcctgttcggttggcaggaagaaagtcatatagacgtcgctgagatcgaccatattcagcacccgaccgcctgccgccagcacttcgcctggctcggcaacccgatactgcacgcgtccgtcacgcggggctttcagttcgctgtcatcgatatctgcggcaatgcgccgttcagtggcttgtgccgcttcgacgcgggtttgcgcctgaatgatattggtgcgtgccgcttctatagccgctttagaagcgcttacctgagctttcgcgctttccagcgcagctcgggcgctctcagcggcggcgcgatcgtcatccagctgttgcgcagaaatagcccctcgttgggccagactacgggaacgcgtatgacgttttgctacggagtccagttctgcctggcgttgattaaccaggctctgtgcggcacgagtttcgctttgtcgttgctccagcaaagcctgcgcggcagcaacggcgctttgtgcctctttgatttgcgcgatggcttccagtcgctgttcctgcaacacgcgagtatccatcttcgccagcacttcaccttcgcgaacaaacttgccttctttcaccagaatggtgtcgatacgcccggcaattttgctggcaatatccacttccgtcgcttcaatgcgcccattactgacagcaaagccttccggcacacctgccgggcgcaacagccaccacgccacgatagccgccaccgccagtaacccgacaacccaccacgccagatggcgcttactcttatccataatcgacccgccataatccctgtaagcaaacgacgcgtgttacaactgccgccgaacgacgttcagcggattcttccatccgggataagaaggaaacggcaaatacgaccagcgcgcagagcattgagcgccaacggggaaggcttagtgaaaacgggtagtaatgttgtcatcatcagcattcctggccgtaaatgaaacacgcatactcataagtgtgatctataaaactggctgacaaaacggtatccatcctgttggatagcgtttcacgcctgttcagttgcaggaacagagcattcctttttacgttttatcaacagtctcaaccagatagtaacattaatattcatgttgtctatggttcagagctgtaacattgtgcgccttctaatcaaaggcataagtccatttctgtttttttcatgctggtaagacttccagggagtggttatctcaggccctgcaccagggttaatttggcaattatgcatgctgaacattcttccagcatgtttactgtcacgggcgttaagacctaaaactgtccccgtttcgcctatgcgttctcttccaccatttccgttatgtgcaacaacttgatttatacctaacatttgactacatgctaatagtgcttcaagtttaggtctgtaatctgtgctaacagaaaaataacgattaaaggatcgacaagagatagcccggctagttttaaactttttgccattaattatagcatgatgctttttattgataattgccgctaattcgaccggatcgagagcattggtcatttcatcaatagagactgttatcggtcctataatgtaacgttttcgctgatcatcaaaagttatcccatgatgatttgccattattttgtatttggggtcatagaaacatacaggataatcttttatcccagagtaggtatcctcatcgagtggtttcatacgcgtgaagttctgcatatagttaccattgcaattcgtttcatgatttccagctaatacatgaacattttcattgatactcattatgcgttttaacaaatcgatgataaattgatcaccacagatattgctaaatcgatcgccggtttggtcgcccagaaacgtacatggcgtcacagcgtctttattaataactaaataaggctgaagactttctaaaataatgtctcttctgttcaggatactgattattgtattaacattagtgttaagttgctcattaaagttctcccttagcaatacgttgagaacttcatcttctatattaagcaactggctaaggaaattttctccttcagccatgattcccaaatgtcccgttgcgaaaagcgcgaacaaaactgcaccgacactgccatcggtatcaccaaaataggttggtctggtacttgtgggatcaacgggtaaacaattggagaaatagattctgtcagcgaactggggttttatcattgtttcgaatttaatatcagatacattatattggcttattttccagttccagatgggtttgtagctctcagtaactgcaacatcattagcattatcatttactgtcatattattaagtaaataaacaatactgcaccaattaatatcggtattatcaagagagcaaccgtaatttttgctattaattgtcacaataaactgataattattattcctacgtagaatatgagcacgcatgccgcttagcatactatatttttcactatgatccgtttgtatggtaaaactaattttgtcatcttgaatagattgttggaaccgttctatttgccaatcatctattttttccacaacctcaccgagcattgtcctggcaatactacttatatcatcacctataccatttgcaatatacccaaacagttctttagtgaagttggtaacatgctcttgcaccatatcatttgttgcgattgtcgttgtactgtcgttagtgcctgccacagttccaattttcatattttacctcatattatttaccgcgaggaatacatagttaacattttatcttatgacatacacctcatgttcgatgggaaaataattatattttgcacaaatcattcagcctcaaagcataatatgaaatttcttatctcatagcagagaaagtccctaaagattgtagaggcgtcatcagaacatgcctctacaatcgattaagaaaacctatgaaatactggcaggattaaaaagacataccaccgtattcatggagttttaatgtagttgaaaacaactaagcccactggaataaattattttattatttttatcacgtgcttccttcagggaatttagccccataataccattatcaaattgttgattatgatctaccccgggcccatgatgcccatatttttgtctaatgtatttgctggggtcttcacctttgagtgtctccccacatatgaagatacgttcacgtgctggtctgaaatcagtagtgttatcaaaataattagcatatacaggtgtgggtttcaaagtattgcttcggattagatggaatagaggatcatccatgtgttctttatgttttttattaaaaatattggctaattcctcaggatcagtaggatttttcatctgattaaatggaacctgcaaagcacgctgacaataacatttttttcttcatctcttattattccgtgatgactggttaaaacttgcctttcactgtcataattacaaacatcgagcgttttaattaagttatacgtatcaccggcagagagtttatgatttgctagtcgtgcagtatagttaccattaaaattgatttcatgatttccagccagaacgacgacatttttattaatacggctatctttattaccctccatatttcgcatagaatttagcaaagtaaggatatatttatcaccaaaaatagtactaaatctatcgcctgtatgatccccaaggaagatacaaggggttatcgcatcgtcctttaaaaaaacatgttgatgcaactcattcaagatcatgtctctcgtatttaataaatcgtagagcactttattatttttatgtttgtatgcagaactagccatctcttcgtgttttaataattcacataataaactccaacccttttccctgatgcctatatgcccactaacgagcaatgcataaagtacagcgcctactcttccatctgtatcgccaaaataagccgtgttggcattttgtgggttaatcacgccacactgtttatagaagtctattttactaaacacagatttaacatagctatcaaacttttccttagtaaacgtctctttagagacatcccaacgccagtcaggtttgaaattaccactaagaagagtaaagaaatttctcgctatgatagaaagcccatcaactttataaattatatcacttttatctccagaggaattaataaaataataaccgcccttacactcaacagtaacggtaatgggagagcttaattttaacacatggttattgtctggtataattgtaaagataaacgtatcagtagtattgtcggcgaatctattatattcttgaatatctatagaaggttcactattataaaaccatactttctccatctggtgactacgatcatttaccttccagtgaccatgttgcaggaaatagatgatatgcaggccaaaatcgttatctatttggctatcattatccagtttatcaaattcaactatctttgcacgatgtgttttatcaaccttgccatggtgttgatgactgttaactttatcactatgcttatcttgatggctactagagatgtttctaatctgattgtcaattgctttcataaataacctgtgatatttttgaattgtttgtaacaaaataaatgatacttgtctgaaaaacagatttacgacgatataaaataataatacttatatgttcgctgattttaagcaccgagactatccggtcttttaccaaataatgaagaataatccctccctggaagataattgtaaaaaacaacagcataagaattaatcttaggataaatttttatttatcatggccttttgaacgctgaaaagtagcgctctgcaaagtaaaccccgctatagttatgctatgcatttgtctttaatgatatctcgtcattatattaacaggatgaaattatcattaatgcatatttcaatattagcagggatacctgaggagtttaaagtgaacatatatatcgggtggcttttcaaattaatccctttgattatgggcttaatttgtatcgcgttaggtggctttgtgctggaaagtagtgggcaaagcgagtatttcgtcgcgggtcatgtgctgatttctctggcggccatatgcctggcattattcactaccgcatttattatcattagccagctcacgcgcggcgttaatacgttttacaatacattgttccccattattggctatgcggggagtattatcaccatgatatggggttgggcactgttagcaggcaatgatgtgatggcagacgagtttgtcgccggccatgttattttcggcgttggtatgattgccgcctgtgtaagcacggtggcagcgagttccggtcactttctgctcattcccaaaaatgcagcggggagcaagagcgacggaacaccggtacaggcttattctagtttaatcggtaactgcctcattgccgttcccgttttactcaccctgctcggtttcatttggtctattacgctgttacgtagtgctgacataactccgcattatgtcgcgggtcacgtattgcttgggttaaccgcaatctgtgcctgtctaattggccttgttgccacaattgtccatcaaacacgtaatacgtttagtactaaagaacactggctgtggtgttattgggttatttttctcggcagtatcacggtactgcaggggatatacgtcttagtcagttccgatgcaagcgcccgactggctcccggcattattcttatttgcctcggaatgatctgttacagcatattcagtaaagtctggctactggcactggtatggagacgtacctgtagcttagccaacagaataccgatgattcccgtcttcacctgcctgttttgccttttcctggcaagctttcttgcggaaatggcgcagaccgacatgggatattttattcctagccgagttctggtcggtttgggagcggtatgctttacgttgttcagtatcgttagtatattagaagcgggttctgctaaaaaataattgcaacgtaccggataaaaccagcgttgaccatttgcgtaacgctggtttttcttaggcatcatgaaataacgcagcattaatgcatagtggttaagtataaaaaacagcaaagttactgtttttttcaacctgttcatatttcataaagatctggccactgagtgagttttcaatcacctttccatccaccttatattaagcatggagggtttcagttcacgggctcattagaaaataatcacaagataaccactatcaaaattagctcatttttaatgcgactctaataattttcatctttaggaaataggtcaggagctctttgctgcaatcaaatcctgcgcacaagcccacgcactgctccacgcccactggaagttatagccccccagccagccggtgacgtccatcacttcgccgatgaagtacagcccaggcactttgcgcgcttccatcgtccgactagagagttcgttggtgtccacgccgccgagcgtcacttcggcagtgcgatagccttcagtgccgttgggttgtacgcgccagtcggtcaatgtgctaatcagtgcctgttggtcacgcacgttgagctgttttaggctaacatccgggatttgcccgagttgctgtaagcgttcaaccaaccgcttcggtagatgaaccgccagtgtgtttttcaggctttgattcggatgtgcgttacgctgctcattcaggaaggtttcgaggtccacatccggtagcagattgatgctgacaaattcccccggttgccagtagctactaatctgcaacaccgccggtccagacaagccgcggtgggtgaagagtaagttctcacggaaaacggtgccgttttcagcggtaatcacggaaggcaccgccacgcccgccagcacctgtaactcttcgagcaacggtttatgcagagtgaatggcaccagacccgcgcgggtcggcagcacgttgaggccaaattgttcggcaatcttataaccaaacgggctcgcgcccagccccggcatactcagcccaccagtcgcgatgaccagcttttcgcaaccgacagtcatgccgttcagatcaagcgtgaagcctgtttcatccttcgccacactcagcacttcgctacgcaatctgaaggtcacattgcccttctcgcactcatccaccagcatgtcgacaatctgctgcgcggagtcatcgcagaagagttgccctaacgttttctcgtgccaggcgatgccgtgtttattgaccagatcaatgaaatcccactgggtaaaacgtgcgagtgcagacttacaaaaatgcggattctggctcagataagcgcctggttcgacataaaggttggtaaagttgcagcgcccaccgccagacataaggattttgcgccctggttttttaccattatcgatcagcagaacccggcgtcctgcctgacctgccagcgcagaacagaacatacccgccgcaccagcgcctataataatggcatcaaacctttccacgttgcgctcctcttagaaaaaacgggcgtgaattgtaaagattcctcagtggtcgcaccagcatcaatattactaaaaggaagtatttgcctgaattatataagataattattttttgagtgaaatccatacagggggcaaatcaaaaaaagtctatatttcactttgcccgcgccgcgaaagtcactgataatgcgccgcgttcatgtcctcaaaatggcgtaacgtcctatgctacatttgtttgctggcctggatttgcataccgggctgttattattgcttgcactggcttttgtgctgttctacgaagccatcaatggtttccatgacacagccaacgccgtggcaaccgttatctatacccgcgcgatgcgttctcagctcgccgtggttatggcggcggtattcaactttttgggtgttttgctgggtggtctgagtgttgcctatgccattgtgcatatgctgccgacggatctgctgcttaatatgggaagctctcatggccttgccatggtgttctctatgttgctggcggcgattatctggaacctgggtacctggtactttggtttacctgcatccagctctcatacgctgattggcgcgatcatcgggattggtttaaccaatgcgttgatgaccgggacgagtgtggtggatgcactcaatatcccgaaagtattaagtattttcggttctctgatcgtttcccctattgtcggcctggtgtttgctggcggtctgattttcttgctgcgtcgctactggagcggcaccaagaaacgcgcccgtatccacctgaccccagcggagcgtgaaaagaaagacggcaagaaaaagccgccgttctggacgcgtattgcgctgatcctttccgctatcggcgtggcgtttagccacggcgcgaacgatggtcagaaaggcattggtctggttatgttggtattgattggcgtcgcgccagcaggcttcgtggtgaacatgaatgccactggctacgaaatcacccgtacccgtgatgccatcaacaacgtcgaagcttactttgagcagcatcctgcgctgctcaaacaggctaccggtgctgatcagttagtaccggctccggaagctggcgcaacgcaacctgcggagttccactgccatccgagcaataccattaacgcgctcaaccgcctgaaaggtatgttgaccaccgatgtggaaagctacgacaagctgagccttgatcaacgtagccagatgcgccgcattatgctgtgcgtttctgacactatcgacaaagtggtgaagatgcctggcgtgagtgctgacgatcagcgcctgttgaagaaactgaagtccgacatgcttagcaccatcgagtatgcaccggtgtggatcatcatggcggtcgcgctggcgttaggtatcggtacgatgattggctggcgccgtgtggcaacgactatcggtgagaaaatcggtaagaaaggcatgacctacgctcaggggatgtctgcccagatgacggcggcagtgtctatcggcctggcgagttataccgggatgccggtttccactactcacgtactctcctcttctgtcgcggggacgatggtggtagatggtggcggcttacagcgtaaaaccgtgaccagcattctgatggcctgggtgtttacccttccggctgcggtactgctttccggcgggctgtactggctctccttgcagttcctgtaatcgtacgcaccaaaacgagcgggtcagctggcccgcttcagattgtgacatagtgcgctttgttcatgccggatgcggcgtgaacgccttatccggcctacaaaaacatgcaaattcaatagattgcagagattatgtaggcctgataagcgtagcgcatcaggcaattttgcgtttgtaatcagtctcgagcgggtcagtttactggcccgctttttttatgcgttattattgctgaagtgcttaatgccaaatcatcaatgcaatcaggctgaccaccaccagaccacacaatgcgctggtcagaataaactgccgacgcacccgctcacagcggcgaataaattcatcatcgtgatgatcgcgataacgttgggcatagatataccaaacgagacgcacctgtttgttgggttggccatgattggtaaaaaagccccctccatcaacatattgatagagcaatggatcgcagttacgcagtaccactaacaacgcgcgtagactactgaaatagcgcgccatgttaacaatgcaaacgacacataaagcccaaaataatgcgacggtgcttatcatacctcctccccggcgacctgcccgcggagttccaccccggggctaccgctcccgatacgctgccaatcagttaacaccaggtcctggagaaaccgcttttgtggtgaccaacatacgagcggctctatagatagtgtaggagatcaggttgttttttttccagaaggttaaccactatcaatatattcatgtcgaaaatttgtttatctaacgagtaagcaaggcggattgacggatcatccgggtcgctgtaaggtaaggatggtcttaacactgaatctttacggctgggttagccccgcgcacgtagttcgcaggacgcgggtgacgtaacggcacaagaaacgctagctggccagtcatcgacaactttatggaaggagtaacactatggcttataaacacattctcatcgcggtcgacctctccccggaaagcaaagttctggtagagaaagcagtctctatggctcgcccctacaatgcgaaagtttctctgatccacgtagatgtaaactactctgacctatacaccgggcttattgatgtgaatctgggtgatatgcagaaacgcatctctgaagagacacatcatgcactgaccgagctttccactaatgcaggctacccaatcactgaaaccctgagcggcagcggcgacctgggccaggttctggtcgatgcaatcaagaaatacgatatggatttggtggtttgtggtcaccaccaggacttctggagcaaactgatgtcttccgcacgtcagctgatcaacaccgttcacgttgatatgctgattgttccgctgcgcgacgaagaagaataatcttccctctacgacgtgttcctgaacgcccgcatatgcgggcgttttgctttttggcgcgccttgttacctgatcagcgtaaacaccttatctggcctacggtctgcgtacgcaatcaaaatccccagccaatacaacatttaacaccatcatattttccatcattagtgtgatcatctggttattttctgttgtaatagtgtattaatctattcaccgcatcaatattaagaatctctgacagatgtaaactttttcgcgcgttatcccttacgcgttcatacttttcaggatggtattggaaggttaataaatatgaatacaacaacacccatggggatgctgcagcaacctcgcccatttttcatgatcttttttgtcgagttatgggagcgattcggctactacggcgtgcagggcgtactggcggttttcttcgttaaacagcttggattcagccaagagcaggcttttgtcacttttggtgcttttgctgcgctggtctatggcctcatttccattggcggctatgtcggcgaccacctgctggggaccaaacgcaccattgttcttggagcacttgtgctggcgattggctacttcatgaccggcatgagcctacttaagcctgacctgattttcatcgccctggggactatcgctgtcggtaacggcctgtttaaagctaacccagccagcttgcttagcaagtgctatccgccgaaagatccgcggcttgatggcgcattcaccctgttctatatgagcatcaacatcggcagcttgatagcgttaagcctggcccctgtgatcgctgatagattcggttatagtgtcacctacaacctgtgcggggcggggttaattatcgcattactggtttacatcgcctgtcgtggaatggtgaaagacattggttctgaacccgacttccggccaatgagcttcagcaaactgttgtacgtgttacttggcagcgtggtgatgatcttcgtatgcgcatggctgatgcacaacgtagaagtcgccaatctggtgctgattgttctctccatcgtcgtcaccatcatcttctttcgtcaggcattcaagctggataaaaccgggcgcaataaaatgtttgtcgcctttgtcctgatgctcgaagcggtggtgttttacattctctacgcccagatgccaacaagcctgaacttctttgccatcaacaacgtgcatcatgaaattctcggtttttccatcaacccggtcagcttccaggcgcttaacccgttctgggtggtactcgccagcccaatactggcaggcatttacacgcatctgggtaacaaaggcaaagacctcagcatgccgatgaaatttactctcggcatgtttatgtgcagtctgggctttttgacggcggcagctgcgggaatgtggtttgcggatgcacaagggctgacaagcccatggtttatcgtgctggtgtacttattccagagcttaggtgaactgtttattagcgcccttggcctggcgatgattgctgccctggtgccgcagcatttgatgggctttattctcgggatgtggttcctgacgcaggctgccgcgttcttgctgggcggctatgtggcaacatttaccgcggtgccggacaacattaccgatccgcttgagacgttgcccgtctataccaacgtgtttggtaagattggtctggtcacgctgggcgttgcagtagtgatgctgttgatggtgccgtggctgaaacgcatgattgcgacgccggaaagccattaattattcttgcagaaagcagggtagcgttatcgctaccctgttttagttttacactggcgtacctgcatagatatcaaagcgatgccctttagtgactaccgcgtttggcgtggcgacattcgccagcggtggcgcgtagtccgggcgctttaccaccacgcgtttggtcgccagcaagcgtgcaggctccagtaatccatcggcatcaagatccggtcccaccaggctctgaaagacacgcatctcttttttcactagcgcgcttttctgcttatgcgggaacatcgggtcgagataaaccacctgcgggcgcggggtaatatcagtcagcgccgtcaggctggaggcgtgaattaactgcaaccgctcctgcaaccagccgccgatttccgcatccgcataaccacgcgccaggccgtcgtcgagtagcgcggcaaccactggattacgctccagcatccgcacgcggcagccgacactagccagtacaaaggcatcgcgcccaagtcctgcagtggcatccaccacatccggcaaataatcgcctttaatgcccaccgctttcgccaccgcctcaccgcgaccaccgccgaatttgcgtcggtgcgccatcgctccgccaacaaaatcaacaaagatgccgccaagttttggctcatcacgcttgcgcaattccagatgttccggcgttaacaccagcgccatcaggttgtcttcatcgtgctccagcccccagcgggccgccagaacagataaggcaccgtctccggtgcctgtttcatcaattaagcagattttcactgaatgatcagcccttaatgccgtaatgctccagcatcgcatccagctgcggttcacgaccacggaagcgtttgaacagatccatcggctcttcactaccgccacggctcagaatgttgtcgaggaagctctgcccggtttcacggttgaaaatgccctcttcctcaaagcggctgaaagcatctgccgccagtacgtcagcccacaggtagctgtagtaacctgcggcataaccaccggcgaaaatatggctgaaagcgtgcgggaaacggccccaggacggagatggcaccacggcaaccagtttcttgatttctgccagagtttcgaggatttttgccccctgatccgggcggaactcggcatgaaggcggaaatcaaacaggccgaactccagctgacgcagaataaacagcgccgcctggtagttcttcgccgccagcattttatccagcaactctttcggcagcggttcgccggtttcatagtgaccagagataaacgccagcgcctccggctcccagcaccagttttccataaactgactcggcagttcgaccgcatcccacggcacaccgctgataccggaaacaccagcggtttcgatgcgggtcagcatatggtgcaggccgtgaccgaactcgtggaagagggtgatcacttcgtcgtgagtgaacagcgccggtttaccatttaccgggcggttgaagttacaagtcaaatacgcgaccggtttttgcaaagaaccatcagctttacgcatctggcctacgcagtcatccatccacgccccgccgcgcttgttttcacgggcatacagatcgaggtagaagctaccgcgcagttcgttattttcgtcatacagttcgaagaaacgtacatccggatgccagacatcaacatctttacgctctttagcggtgatgccgtaaatacgcttaaccacttcaaacaggccgttaaccgctttgttttccgggaagtacggacgcagctgttcgtcactgatgctgtagaggtgctgtttttgtttttcgctgtagtaagcgatatcccacggctgcaactcatcgacgccaaattcggctttggcaaaggcacgcaattgcgccagctctttttcgccttgtggacgcgcgcgttttgccagatcggttaagaaatccagcacctgctgcgggttttctgccattttagtggcaagggatttaaaggcgtagttttcaaagcccagcagttgcgccagttcgtgacgcagcgcgaggatctcttccatcaccttgctgttatcccatttaccggcgtttgggccttgatcggaggcgcgggtgctgtaagcgcgatacatctcttcacgcagagcctggttgtcgcagtaggtcattaccggcaagtagcttgggatatccagcgtcagcaaataaccttccagctctttcgcttcggcctgggcttttgccgcagccagcgcgctttctggcatccccgccagctccgcttcgtcggtaacgagtttggtccagcccattgtcgcatcgaggacgttgttgctgtactggttgcccagttcagaaagacgggtcgcaatttcgccgtaacgctgctgtttctctttcggcagacctatgccagagagttcaaagtcgcgcagtgcgttatcaaccgctttcttctgcgccgtgttcagcgtggcgtaatgatcgccatcgcgcaggtcgcgatacgctttatacagcccttcatgttgccctacccaggtgctgtattcgctcagcagcggcagggtttgttcgtaggcttcacgcagttccgggctatttttcacgctgttcaggtggctgaccggggagaagatacgccccaacacatcgtccacttccgccagcggctggcagagattttcccaggtgtacggtgccccttgcgctactacgcgctccacgttttcgcggcagtcgttcaatgccttagtcacggctggaacgacatgttccgggagaattttagaaaacggaggcaattcaaagggagtcagtaacggattcgtcattcgcgcagtcctggttaaagaggttaaggaagcgctcaacaggcgctttacataatgtgtgtagcatggggttaagtgtagtgaatttcaatgagaaacgttacgctttcgcggcggcggcctcttttcggtatactgtcctgatacgcttttgtgcgccccgaatacgggccgatttttacttaccggaacacctttacccatgctcagttatcgccacagctttcacgctggcaaccacgccgacgtccttaaacataccgttcagagcctgatcatcgagagcctgaaagagaaagataaaccgtttctctatctcgacacccacgcaggggccgggcgttatcagttaggcagcgaacatgccgagcgtaccggcgaatatctcgaaggcatcgcccgtatctggcagcaggacgatttgcccgcagaactggaggcgtacatcaatgtggtaaaacacttcaaccgtagcggtcagttgcgttactaccccggtagcccgttgattgctcgcctgctactgcgtgaacaggacagcctgcaactgaccgaactgcacccgagcgattacccgttgttgcgttctgaatttcagaaagatagccgtgcgcgtgtcgaaaaagccgacggtttccagcagcttaaggccaaactgccgccggtttcccgccgtggtttaatccttatcgacccgccgtatgaaatgaaaactgactatcaagcggtggtcagcgggatagcagaaggttacaaacgtttcgccactggtatttacgcactgtggtatccggtggtgctgcgtcagcaaattaagcgcatgatccacgatctggaagcgaccggtattcgcaaaattctgcaaattgaactggcggtactgccagacagcgatcgccgtggcatgaccgcttccggcatgattgtgattaacccgccgtggaaactggaacaacagatgaataacgtgctgccgtggctgcacagcaaactggttccggcaggcaccgggcacgccaccgtaagctggatcgtgccggagtaattgcagccattgctggcacctattacgtctcgcgctacaatcgcggtaatcaacgataaggacactttgtcatgactaaacactatgattacatcgccatcggcggcggcagcggcggtatcgcctccatcaaccgcgcggctatgtacggccagaaatgtgcgctgattgaagccaaagagctgggcggcacctgcgtaaatgttggctgtgtgccgaaaaaagtgatgtggcacgcggcgcaaatccgtgaagcgatccatatgtacggcccggattatggttttgataccactatcaataaattcaactgggaaacgttgatcgccagccgtaccgcctatatcgaccgtattcatacttcctatgaaaacgtgctcggtaaaaataacgttgatgtaatcaaaggctttgcccgcttcgttgatgccaaaacgctggaggtaaacggcgaaaccatcacggccgatcatattctgatcgccacaggcggtcgtccgagccacccggatattccgggcgtggaatacggtattgattctgatggcttcttcgcccttcctgctttgccagagcgcgtggcggttgttggcgcgggttacatcgccgttgagctggcgggcgtgattaacggcctcggcgcgaaaacgcatctgtttgtgcgtaaacatgcgccgctgcgcagcttcgacccgatgatttccgaaacgctggtcgaagtgatgaacgccgaaggcccgcagctgcacaccaacgccatcccgaaagcggtagtgaaaaataccgatggtagcctgacgctggagctggaagatggtcgcagtgaaacggtggattgcctgatttgggcgattggtcgcgagcctgccaatgacaacatcaacctggaagccgctggcgttaaaactaacgaaaaaggctatatcgtcgtcgataaatatcaaaacaccaatattgaaggtatttacgcggtgggcgataacacgggtgcagtggagctgacaccggtggcagttgcagcgggtcgccgtctctctgaacgcctgtttaataacaagccggatgagcatctggattacagcaacattccgaccgtggtcttcagccatccgccgattggtactgttggtttaacggaaccgcaggcgcgcgagcagtatggcgacgatcaggtgaaagtgtataaatcctctttcaccgcgatgtataccgccgtcaccactcaccgccagccgtgccgcatgaagctggtgtgcgttggaagcgaagagaagattgtcggtattcacggcattggctttggtatggacgaaatgttgcagggcttcgcggtggcgctgaagatgggggcaaccaaaaaagacttcgacaataccgtcgccattcacccaacggcggcagaagagttcgtgacaatgcgttaaatgttaaagggctaagagtagtgtgctcttagcccttaattacgtttccgctatcagttcagaagctgaagcagaaagcggatcagttccagcagcgcaattaacgcccctagaacgatgattgctttatcaatcacccgttttctccatgcgatggagtgagaatgcatccgcttactcatccactgcctgtcacggcgcatgtctcattgttagataagaactctctcactccggccagagcatcagttaacggcaccacccgtacttctgaccaggactttgaaagcgtttatgcgcattgccagagtgaaaatgcctcagagctaactggataatcatacagtacatgcaggttataaaaccagcacgtccttgcaatagtttcagtatggtattagcattgatgcgttagatgatggctatctcactccagtcagagccaccaactcagggctggaaagtaaaaaaccgacgcaaagtcggtttttttacatccggattcggacaaggcttaatatgacgatgacccagtgaaagtatataaatcgtcactgcgatatataccgaagtgctccctccgccagctgaagaaatcgctaattcttgcaatgttagccactggctaatagtattgagctgttagataagaactctctcactccagccagagccaccaactcagggctggaaagtaaaaaaccgacgcaaagtcggtttttttacgtcctgattcagacctcctttcaaatgaatagccaactcaaaattcacacctattaccttcctctgcacttacacattcgttaagtcatatatgtttttgacttatccgcttcgaagagagacactacctgcaacaatcaggagcgcaatatgagttttctgttacccatccaattgttcaaaattcttgctgatgaaacccgtctgggcatcgttttactgctcagcgaactgggagagttatgcgtctgcgatctctgcactgctctcgaccagagccagcccaagatctcccgccacctggcattgctgcgtgaaagcgggctattgctggaccgcaagcaaggtaagtgggttcattaccgcttaagtccgcatattccagcatgggcggcgaaaattattgatgaggcctggcgatgtgaacaggaaaaggttcaggcgattgtccgcaacctggctcgacaaaactgttccggggacagtaagaacatttgcagttaaaaatttagctaaacacatatgaattttcagatgtgttttatccgggaggcattatgttactggcaggcgctatctttgtcctgaccatcgtattggttatctggcagccgaaaggtttaggcatcggctggagtgcaacgctcggcgcagtactggcgttagttacgggcgtggtccatccgggtgatattccggtggtgtggaatatcgtctggaacgcgacggctgcgtttatcgccgtcattatcatcagcctgctgctggatgagtccggcttttttgaatgggcggcgctgcacgtcagtcgctggggtaatggtcgtggtcgcttgctgtttacctggattgtcctgctcggtgctgccgttgccgccctgtttgccaatgatggcgcggcgcttattttgacaccgattgtcatcgccatgctgctggctttagggttcagtaaaggcactacgctggcgttcgtgatggcggccggattcattgccgataccgccagcctgccgcttattgtctccaacctggtgaatatcgtttccgctgatttctttggcctcggctttcgcgaatacgccagcgtgatggtgccggtggatatcgccgcgattgttgccacgctggtgatgttacatctctattttcgcaaagatattccgcagaactacgatatggcgctgctgaaatctcccgcagaagcgatcaaagatcctgctacgttcaaaactggctgggttgttttactgcttctgctggtgggatttttcgtcctggaaccgctcggcattccggtgagcgccattgcagctgtgggcgcgctgatattatttgtcgtcgctaaacgcggtcatgcgattaatacgggtaaagtcctgcgcggtgccccctggcagattgtcatcttcagcctcggcatgtatctggtggtttatggcctgcgcaatgccggattaacggaatatctttctggcgtactcaacgtgctggcggataacggcctgtgggccgcgacgctcggcaccggattcctcaccgccttcctctcttctattatgaacaatatgccgacggtactggttggcgcgttgtccattgatggcagcacggcatctggcgttatcaaagaagcgatggtttatgccaatgtgattggctgcgatttgggaccgaaaattaccccaattggtagcctggctacgctactctggctgcacgtacttagccagaagaatatgactatcagctggggatattacttccgtacagggattatcatgaccctgcctgtgctgtttgtgacgctggctgcgctggcgctacgtctctctttcactttgtaatgagatactgatatgagcaacattaccatttatcacaacccggcctgcggcacgagccgtaatacgctggagatgatccgcaacagcggcacagaaccgactattatccattatctggaaactccgccaacgcgcgatgaactggtcaaactcattgccgatatggggatttccgtacgcgcgctgctgcgtaaaaacgtcgaaccgtatgaggagctgggccttgcggaagataaatttactgacgatcggttaatcgactttatgcttcagcacccgattctgattaatcgcccgattgtggtgacgccgctgggaactcgcctgtgccgccctagtgaagtggtgctggaaattctgccagatgcgcaaaaaggcgcattctccaaggaagatggcgagaaagtggttgatgaagcgggtaagcgcctgaaataaagcggcgatatcccccccacaggttgttagaaaagtgcgctttatttatgtcggatgcgacgctggcgcgtcttatccgacctacaaagttatgaaaattcgatgaatagtatgttatttgtaggcctgacaggcgtagcgcatcaggcgattttgctatttacacagtactccctgcgtgagattccaattatcgcgtccagcatggtgtatcagtgagctgcttagttatcagcgatacagcgcagtagtttaaagacgtactggattatgatttatcagtggtttacacaacaaattattaaataattataagataccttaacccattttattattacacatctaaaacatcacaaaaaaaaatcacttcacacactatcagagaacataataactttttaaaatgagcgcattttgatagttgttaacgatttcctttacgatactatcactaccctttttttacacacaaatattaccgggtggagataaaagggaaatcaaaggtaattatatcaggaagatataacgcattacatttattgtgtgtagaagaaaatccattcctgttctaattatccaatttaaacatcttagcataaaacaaatgatgaataaggaattttatattgattattagcactttataatcattgaataaaaatagattttatgtacttttaaaacaatgcactatattatggggtgatggatattcatgtcacgccccaaaattaactgagttcacctaaacagaaaggatataaacatcagacaggtttacgttactatcaggcatatcacctcagaatcagatgaaaactataaagaaatatctattatggttttaatatttgttgataaggatagtaacatgaacatgacaaaaggtgcactcatcctcagccttagttttttgcttgccgcatgtagtagtattccgcaaaatatcaaaggcaataaccaacctgatattcaaaaaagttttgttgctgttcataaccagccggggttatatgttggtcaacaagcgcgctttggtgggaaggttatcaacgttatcaatggcaaaacggatacgttgttagaaatctctgtattaccgttggatagctatgcgaagcctgatattgaagccaactatcagggccgactgctcgccagacaaagcggcttccttgatccagtgaactatcgtaatcactttgttaccatcctcggcaccattcagggtgaacaacctggctttatcaataaagtcccgtataacttcctggaagtgaatatgcagggcatccaggtgtggcatttgagagaagtggttaataccacctataacctgtgggattacggctatggtgcattctggccggaaccgggctggggtgcgccttactacaccaatgcggtgagtcaggtaacacctgagctggtcaaataacaccaccgaaagatgcagatgctttctcagcatctgcatcatgcattacatcaaattaatacacagtaagctaactattattattataagccctgtcctgttaattacctttggcaaactgattataaagttaatgtccgcaccaggagtcggttatgtttcttataattaccagggatacgatgttcttcaccgcgatgaaaaacattctgagtaaaggtaatgtcgttcatatacagaacgaagaagagatcgacgtaatgttgcatcagaatgccttcgtcattattgatacattaatgaataatgtatttcattctaattttctcactcaaattgaacgattaaaacctgtccatgtcattattttctccccctttaatattaaacgctgcctggggaaagtgccggtgacctttgttccgcggactatcactatcattgattttgtcgcactcatcaatggcagttactgctctgtgcctgaagcggctgtgagtcttagccgcaagcaacatcaggttctgagctgcattgcgaatcaaatgacaacggaagatattctggagaaactgaaaataagcctaaaaacgttctactgccataaacacaatatcatgatgatcctcaatcttaagcggatcaatgagctggtacgccatcagcatattgattatctggtgtgaatttcaggcttacggtgagtctggctacgctgccacacagattagctaatactaacgcctttcacccctgccataccttttaataatcgcaacaggtcttctatgctcgttgtggcatgaagctggatatcaatggcgaccacttcatgatcttcattttcctgcaagctaactaaatcagtttttattttttgctgcttaaaccagtcgagcatacttaccgtattaccgttcactaatgtcagctgtaaatggtaatttttgttcatcaggcggaaggttaattgatggaagacttccagcaccaacaaggtcatcacactaccataaatacccagttcgtacataccgctgccaataaccatacctatggcggcggtcacccagatatccgctgccgtcgtcagacctacaatattttggttacgaacgagaatgttacctgcaccgataaacccgacgcccgtcaccacctgagcagcaatacggctggggtcgagtccgacgtgatctaaagacagcacgtcagcaaaaccatatttgctaacaatcataaacagggcgcttcccatgccaattaatacatgtgtgcgtaaccctgctcctttgccgcgcatttgcctttccatgccaatagcgccacaggcaattgccgcgagtataagacgtataataaattctgctgtcatataaaaatgcaaaaaggagcagcaagatggctcaacttgctactcttttttacttgcacctcattaattcggcaagtcattagatgcttgatttttgaaggtatacaaatttttctgcgggtttttcttacagtattcgatcactttaggaatttgagtgagatcggtttcatttaaagtaacggtatcgccacctttatatactgtttcttcatgcagcatccaccatgcaaccggggtcattgcttttggattcagatcaataaattcctggcaggtcatatctttagcggattcattggctgccaacgcagattgtgcgttcaccagactcaaagccgctacagcgcccataaaaataaacgctttacggagagaactaatattcattttgtaacccattcaatatagagattatatatgaacaggaggaatagctgcttttaaagaagatattccggcctgttcaatatgcaaggaagtacgatgtaacgcattcccggaattacatatctttcttaattttgtcccattcgcctttaactttatctttaaagttggcttgtttatcctgagtacaagcctgaacgatagctggggttacggttgcaataccctgaacatctaaaaccgcatcttctggtttatctttgttgttcagcgcttcagcaaaaccaactgcagttggctggaaggattcgtccacagccaggaaatcttcacaggtccaggagttgaccggttttttgttatcagctgctttttgcgcatccgctgcattgctcacaactggcagaagaagcagaccaccaagaataacgcctaatacttttttcatcgtaatatcctcaactataaagtgaaagagccgtcacgaatcaatttcgacactgaggttataacctggttttctgtatatgtcatgttgatggaaaatatcaaaatcagatatttttatttcaatacaatgagttacagatgcatcagatactgcaattaggaaatttttattaaatcgactgcattcttagacgcgtttttggcatagattgatagcaggggattttcttcttaattttatagggtggttctatgttatatatagataaggcaacaattttgaagtttgatctggagatgcttaaaaaacatcgcagagcaatccagtttattgccgtgctgctgtttatcgtcgggttgctgtgtatcagtttcccgttcgtctctggcgatattttaagcacagtagtgggtgcattattaatctgcagcggtattgcgcttattgtcgggttattcagcaaccgcagtcataatttctggccggtattatccggtttcctcgtcgcagtcgcctatttattgatcggctatttcttcatccgcgcaccggagctgggcatttttgccattgcggcatttattgccggtttgttctgtgttgcaggggttattcgcctgatgagttggtatcgtcagcgtagtatgaaaggcagctggctacagctcgttattggtgtgctggatatcgtcattgcctggatattccttggtgcaacgccgatggtgtctgtaacgctggtttccacactggtgggaattgaactgatatttagcgccgccagcctgttcagcttcgccagtttgttcgttaagcagcaataattaccccggttgtcacccggatcatagtcacttgatgtgactatgatccgattaatactctctccgctacgcagtgttgtagatcaattgcgcactatcattgaaataattacctgctagtgattatttcaacctactgaatttcatctaatttttttcactctatggcaaattagccatttcaaacattatcatggctgatattttccgtagtcaggtttaatgttttaaaagtgctgtgggaaagtgaacaaagagttccgtaagcgttgatgctatgggcggttaaataagtaatccgggttcatttttttgcaactggcgttgattacattgcataaatatccgtgtctccagacgctatataaaaacctgaagacatgaatgcgttatttactcaggtaatttcaatgcgttaaaagaaagctggcaatccaattgccagcttaagtcgaaacaaggagactcgatatttaaatcggattacattttaactttagtaatattcttcagagatcacaaactggttattgataacttattcttgggcagtaatccgcaaacgttaactttttgtttgctatttacaagctgataacaaccaggaatcttacttaggatcaatatatggagtgcgtgatggataaatctgaagtattgattagtgttaatagacgtattagttcacgaagggtaaagttcttataggcgtttactatattgaacaacgattcggacaaggatgtaaataatgaaaaggatgacatattcgaaacgataacggctaaggagcaagttatgatttttctcatgacgaaagattcttttcttttacagggcttttggcagttgaaagataatcacgaaatgataaaaatcaattccctgagtgagatcaaaaaagtaggcaataaacccttcaaggttatcattgatacctatcacaatcatatccttgatgaagaagcgattaaatttctggagaaattagatgccgagagaattattgttttggcaccttatcacatcagtaaactaaaagctaaagcgcctatttattttgttagccgcaaagaaagtatcaaaaatcttcttgagattacttatggtaaacacttgccccataagaatagtcaattatgttttagtcataatcagttcaaaattatgcaactgattctgaaaaataaaaatgaaagcaatatcacgagcacgctcaatattagccaacaaacattaaagattcagaaattcaacattatgtacaagctgaaactaagacgtatgagcgacatcgtcaccctgggtatcacatcttatttttaatcaggacataagcaactgaaattgatggctggcatgacgagggatgcagatgctgatttcattacccccggtgattactaaaggagaggctaaaacgactttattcccctggtatgtgtatccaccagtagaacccttcgttgcccgaatgctggcaggaactgttggcagaacggcaacattttttttgtcgttgacctcaccatgtcgatcactgtgcctgtatcccaccttactggctgacaaccccactatgccgctggtctgtaaatccctcatatctctcctcgcgcgcaatttaaagaaccgttatttctcaagaattttcagggactaaaatgaacagaagaagaaagctgttaataccgttgttattctgcggcgcgatgctcaccgcctgcgatgacaaaagcgcggaaaacgccgccgccatgacgcctgaggtcggtgtcgtcacactctcccccggtagcgtcaatgtgttgagcgaattgcccggtagaaccgttccttatgaagttgccgagatacgtccccaggtgggcggtattatcattaaacgcaactttatcgaaggcgataaagtgaaccagggcgatagcctgtatcagattgatcctgcacctttacaggccgagctaaactccgccaaaggcagcctggcgaaagcgctctctaccgccagcaatgcccgcatcacctttaaccgccaggcaagcttgctgaagaccaactacgttagccgtcaggattacgacaccgcgcgcacccagttgaatgaagcagaagccaatgtcaccgtcgccaaagcggctgttgaacaggcgacgatcaatctgcaatacgcgaatgtcaccagcccgattacgggcgtcagcgggaaaagcagcgtgaccgtcggcgcactcgttaccgctaatcaggcagatagcctggttaccgtacaacgtctggacccgatttatgtcgatctcacgcagagcgtgcaagatttcttacgcatgaaagaagaggtcgccagtgggcaaatcaaacaggttcagggcagtacgccagtacagctcaatctggaaaatggtaaacgctacagccagaccggcacgctgaaattctccgacccgacagtggatgaaaccacgggctccgtgacgttacgggcgattttccccaacccaaatggtgacttgctgcctggcatgtacgtcacggcattagtggatgaaggtagccgccagaatgtattactggtgccgcaggaaggcgtcacccacaacgcccagggtaaagcaacggcgctcattctggataaagacgatgtcgtgcagctacgcgaaattgaagccagcaaagccatcggcgaccagtgggtcgtcacctctggcttgcaggctggcgatcgggtgatcgtttccggtttgcaacgcattcgtccgggtatcaaagcacgagcaatttcctccagccaggaaaacgccagcaccgaaagcaaacaataacgttgcaggcttaaggggactttcatggctaactattttattgatcgcccggtttttgcctgggtacttgccattattatgatgcttgcaggtggtctggcgatcatgaacttaccggttgcgcagtatccgcagattgcgccaccgaccattaccgtcagcgctacctatccaggtgccgatgcgcaaacggtagaagacagcgtcactcaggtgattgagcaaaatatgaatgggcttgatggcctgatgtacatgtctagtaccagtgatgcggcgggcaatgcctctatcactctgaccttcgagactgggacatctcctgatatcgcacaggttcaagtgcaaaataaactgcaactcgctatgcctagtttacctgaagcagtgcagcagcaggggattagcgtcgataagagcagcagtaatatcctgatggtagcggcgtttatttctgataacggcagcctcaaccagtacgatatcgcggactatgtagcgtctaatatcaaagacccgctaagccgtaccgcgggcgttggtagcgtacaactctttggttccgagtatgccatgcgtatctggctggacccgcaaaaactcaataaatataacctggtaccttccgatgttatttcccagattaaggtgcaaaacaaccagatttccggtggtcaactgggtggcatgccacaggcggcagaccagcagctaaacgccagcatcattgtgcagacgcgtctgcaaacgccggaagaatttggcaaaatcctgttgaaagttcagcaagatggtagccaagtgctgctgcgtgatgtcgctcgcgtcgaacttggggcggaagattattccaccgtggcacgctataacggcaaacctgctgccgggatcgccatcaaactggctgccggagcaaacgccctggataccagccgggcagtcaaagaggaactgaaccgcttaagtgcctatttcccggcaagtctgaagacggtttatccttacgacaccacgccgtttatcgaaatttctattcaggaagttttcaaaacactggttgaggctatcatcctagtcttcctggtcatgtatctgtttttgcagaatttccgtgccacaatcatcccgacgattgccgtaccggtggttattctcgggacgtttgcgatcttgagcgcggtcggtttcaccatcaacacgttgactatgttcgggatggtgctggcgatagggttactggtggatgacgccatcgtggtggtggagaacgtcgagcgtgtcattgcggaagataagctaccgccgaaggaagcgacgcataaaagcatggggcagatccaacgtgcgctggtcggtattgccgttgttctttccgcagtgtttatgccgatggcctttatgagcggtgcaaccggggagatctaccgccagttctccatcacgctgatctcctccatgctgcttagtgtatttgtggcaatgagcctgacccctgccctgtgcgccaccattctgaaagccgcgccggaaggcggtcacaaacctaacgccctgttcgcacgcttcaacacgctgtttgaaaaaagtactcaacactataccgatagcacccgcagcctgttgcgttgtaccggtcgctacatggtggtctacctgctgatttgcgccgggatggcggtgctgttcctgcgcacgccgacctctttcttaccagaagaggatcagggggtatttatgaccaccgcgcagttaccttccggtgccaccatggttaacaccacgaaagtgctgcaacaggtgacggattattatctgactaaagagaaagataatgtccagagcgtgtttaccgttggcggctttggcttcagcggtcaggggcaaaacaacggcctggcgtttatcagtctcaagccgtggtctgaacgtgtcggtgaggaaaacagcgttaccgcgatcattcagcgggcaatgattgcgttaagcagtatcaataaagccgtcgtcttcccgttcaacttacccgcggtggctgaactgggtaccgcgagtggttttgatatggaactgctggacaacggtaacctggggcacgaaaaactaacccaggcgcgaaacgagctgttaagtctggcagcgcaaagtccgaatcaggtcaccggggtacgcccgaacggcctggaagatacgccgatgttcaaagtgaacgtcaacgctgcgaaagctgaagcgatgggcgtggcgctgtctgatatcaaccagacaatttccaccgccttcggcagcagctacgtgaacgacttcctcaaccaggggcgggtgaaaaaagtgtatgtccaggcaggcacgccgttccgtatgttgccggataacatcaaccaatggtatgtacgcaacgcctctggcacgatggcaccgctttctgcctacagctctaccgaatggacctatggtagtccgcgactggaacgctacaacggcatcccgagtatggagattttaggtgaagcggcggccgggaaaagtaccggtgacgccatgaaatttatggcagacctggtcgctaaacttccggcaggcgtcggctacagttggaccggactaagctatcaggaagcgttatccagtaatcaggctcctgcgctgtatgcgattagtctggtcgtggtgttcctcgccctcgccgcactctatgagagctggagtattccgttcagcgtgatgttggttgttccgttaggcgtcgttggcgcattactggccaccgatctgcgcggcttaagtaatgacgtctacttccaggttggtttgctgaccaccatcgggctttccgccaaaaacgccatcctgattgtcgaatttgccgttgagatgatgcagaaagaagggaaaacgccgatagaggcaatcatcgaagcggcgcggatgcgtttacgcccaatcctgatgacctctctggcctttattctcggcgtgctgccgctggttatcagtcatggtgccggttctggcgcgcaaaacgcggtaggtaccggcgtgatgggcgggatgtttgccgcaacagtgctggcaatttacttcgttccggtctttttcgttgtagtggaacatctctttgcccgctttaaaaaagcgtaacgtgtaaatgagagtaaggttgaacatgaaggttcagccttactctttcctgctaaccattcaccactcaacaaccagctaaccgtcaggaataccaggcttagtacacagcactgaaagtagaaaccactccagccattcgtcatcaatttgaacaacacaatactgacccacattcccgtaatcgtatgaattgtcagcttaataatcccaaacatgccgagtcttttcctcctgaaaataccgataccgcctggcaaactgcgaaagagaactagccggtagcccggcagaaatcatcagggaagagtttcacatgaagcaggtgtgagatcctgaccaatattcaaatgcgaaatatgtcaggaaaaggtacctgggctatgttgcgcaaactgatgtggcgttacaccataatattgtcgaaatgtgtttataaagtagcttgtactgctatagccacatttttccgcaatagtatgcagaggaatttgacgtaactcgagtaatcgtctggccatgctcatcctggaggcgagtaatattttactgaaacaggtattttcatcctgcaacttttttttgattagactctcgctggtatacattctttccgcgatatcgcgcagataccaacgtttggcgatatcaaagctaataaggcgttcaacttttccactaacagtgctgatgctattgaaaagtaaggggatcagttctttcttatgagaaaacatgcttaaacaggaaaggtagagcatattgctcagtatcggactatttaccccggattcattgaagctatcaaaaatcgccgtcaccagcggcatggggggactctggttaattaacaaacggtctttgctgtgtaaccctaaattgcgtggtagctgacgaatattttgtaagtaatggcaaactgtcagctcatcgatatccagtcgtcgcgtatccggactacaaaacgcaaaatcgtctgccaaatttttctccagcagcagaatactctcgttatgcaggcttattttttgctgttcatgataaatatcgaaactacgacgaatgaggatcacgctgcagacatgagtcatgattatcccttatatttcatactgcgattatttcaatttcagtatactaatgaaatgatgccagactgtttcttagcgcaaaaactgccagatttggtaggaccaaaatttatccacaaagtagttttgcataacagttaattgataataagtaaatgcagcacgaatatattttcgcacagcgtatagcttatgtttataaaaaaatggctgatcttatttccagtaaaagttatatttaacttactgagagcacaaagtttcccgtgccaacagggagtgttataacggtttattagtctggagacggcagactatcctcttcccggtcccctatgccgggttttttttatgtctgagtaaaactttataatcttattccttccgcagaacggtcagtgccgtaaaaattcccttgcgcaacaatacttgccgcgctgtcacggttgctcaatctctgcgcgcttcgctcctgatactctgtgggcgtcatcccataataatttcgaaagacgtaaatgaaatagctcacgctgtgatatccacaggatactgcaactcgcttaatactaaaaccatgtataacaataagttgcaaagcacgttgcattctacactcagtaagcaactgactataacttgtctcttcttcgcgcaattttttctttaacagacttggactcatcaacagctcgctggcgattcgggctagtgtccactcatgggcgatattattattgataaccgtacaaactcgtgttcgcatgttcggttgtaaaacgttcagaagcagcggtataaagtgctcatcctcaagaaaaacagataacaacgcaaagattaatgctcttttacgtagcatttctgcatagcgaagattcttattctggcttagttgcgcaacttcctgaaaaacaggaatatctctactacagtgatgaacgagtaaactagaaacttttttatgtgcatgaagatttaatgcctcctccttgagcatcgggagaaataaactaagcgtgtccctactcacgaatacaaaattttcaacacacttatctactcgaatttggcttgcatccgcaaaaaccaggtcaccgccattaaaatagcgatattcaccattaaccatggtgagaatatatttatgtcttgcatacgcaattagacaattcccatgtagactttgcatagttgacttaatattacataaacatattactgtttattaatgtagcacgccgccctcttaagtcaaattgattgataaataaatttaaacgaagcgggagaacaggatgataatgtgtgatgttctacgggcaggatgactggatttataatacaaaaacgtgtttaagaacacagggaaattaatagtaagcaaataatcccttttcgtgacattaaaggtaatcgctacatttaataaacattcatataacatatatcttatcaacacgatgaatagacagccaatatattattgcgattaataagcaaccgaatgcccagctgtttttttaaaggctgggcattcggtttttacaacgttatgttatcaggtgtgtttaaagctgttctgctgggcaataccctgcagtttcgggtgatcgctgagatatttcagggaggctttgtagtcttccagcaacagttcagcaaagtccatttcgaagccgcgacgacacataatgcgcatcaccacgatgtcggtggcttcaccgccgagagtgaaggccggaacctgccagccgcgcagacgcagacgttcagagaggtcgtacagggtgtatcccggatcttcaccatctttcagtttgaagcaaaccgccgggatgccttcgtccgggcgacccgtacagatgaactcatacggccccagtttggcgatttcatccgccagataagcggcaacctggtaagaggcgttctgtactttggtatagccttcacgaccgaggcgcaggaattcatagtactgtgcaattacctgacccgccgggcgggagaagttgatggcaaaagtaccaatttgaccacccaggtagtcaacgttgaacaccagttcctgcggcagcgcttcttcgtcacgccagataacccagccgcagcccagcggagccagaccgaatttatggccactagcactgatgcttttcacacgcggcaggcggaagtcccagacgatatccggggcgacgaacggtgccaggaagccaccgctggcagcgtcgatgtgcatgtcgatgtcgataccggtgtcggcctggaatttatccagcgcatcgtgcagcggttgtgggaactcatagttaccggtgtaggtcacgccgaaagtcggcaccacgccgatggtgttttcgtcacaggcttcaatcatgcgtttcgggtccataaacaactgaccggggcgcatagggatctcacgcagctccacatcccagtagcgggcgaatttatgccagcagatttgtaccggaccgcacaccaggtttggtttatccgttggtttgcctgcagcttccatacgcttgcgccaacgccatttcatcgccatcccgccgagcatacaggcctcggaagaaccaatggtgttggtgccaacggcctgaccatttttcggcgcaggcgcatgccacagatcggcaaccatatttacgcaacgcaggtcgatggctgcggattgcggatattcttctttgtcgatccagtttttattgatgctcaaatccatcaatttatggacgttttcgtcgtcccaggtctggcagaaagtggccaggttctgacgagcgttgccatcaagatataattcatcattgataatctgaaatgcgacatcatcgcgcatttcgtgcagcggaaatcgtttactctccgcgatagtagaaatggcctttgcgccaaaacgactatcgagtagttcactgcggaaatccgttaacagcttctggtccatttcgaactccttaaatttatttgaaggcaataaaaaagtaggatttatccgcaatggaagcaaggcattacaggcttaatttaaataacaaaatcctaagcagaaaaacgactttttataatataaacatttaacatgataatattaaaaacagactttattatcgtaataaaaatcgcccaaacattgctgttcgggcgatcaaattaattattgtttatcctgcatatacggcgtgtacaccccgttcagactgtgcaggaaagctacgatatcatccacatcctcctgcggcagctctttgcctacctgatagcgcagcatcagtttcaccgccccgtccagcgtcggcacgtcaccgcgatggaagtacggtgccgttaaagcaacgttacgtaaaccgggtactttctgacgcaatttatcacgctcttctttagtcacattcatacgaccaatatccgccgccgtaatttccccaaagttaaagtcttttttcagccccaacggttcaaaggaacgtccgccgagaataataccaccatgacaagttgcacatttattatctttaaataattgatagccttttttctgttgcgccgtcagcgcattttcatctccgcgcaaccatttatcaaatggggaatccggcgtaattaatgttttctcaaattcagcaatggcatcagtaatattttcgccactgaaaccttgcggatagacttcgaggaactgcgttttaagctgcggatctttttccagcttagcaataatttcgtcccaggatttgctcgccatttcaatcgggttcaacggcggtccaccagcctgatcctgcaatgttgccgcacgaccatcccagaactgctcaacgttaaatacactgttaaataccgtcggcgcgttaatcggcccaactgcgccaccaacaccaatgcttgtttttctgccatcgacgccccccgcattcaacgcatggcaatgagcgcaactaatggtgctatcagcgcttaaacggggatcgtgatacagcgcaaaacccaacgccactttttgcgcatcggtaggcagtttttgcgggatgggctgcaccggttcattgcgatgttccggagcagtatcattgctggcgtaatattccgcgcgctgttttgcaatccaggccagtatttccgcccgctcttcatcactcaccttacccgcccagtgtagcgcggtataacgcgttggtggcatagtttcatactgcatcacccattcaatcttattcaaatcgctttggctaacgggtttatcagccagcagtgccgcacgcacggcctcaaggttaaaagatttatatccaagcttaatgtcgtaatccatcaactgtttcgcgccaggaatataataataggcgggtaattctgcgctaggcgtgtggcaatagtcgcatcctttttcgcggagaaagcctaaaaccttattattttcactgacagcagatgcctgaacatcggcctgtttactgcgtttattatcgtggtaccacacataaccagataaccctaaatagcaaatcgcgacgccagccaggccgatcgcggtaatacgactgaccattttcattattcttccctcacggtggtgagttattgtgacccagaaaattttccagaatgctgcaaacgtctctgcgagacaaagccatcataaaaaacagggagatacgctttttgataggaatcaatcaattacatgaatataaactatcaataagatagcctgtgcctattacccagatcaggaatggcatatcatgattgcggcgagagcaggattgaatgttctgaaaatgaaaaacaacaccaaatcggtatttttataaattccattgatattagtgcgttatattttttgacaggttaataaacgtgatccaccgcacgctttgtcgcccaccaggcggagcgaatgactacccttaaagaaaagccgataattagcgacgaatttcggaggttggatccttatgctcaatcagaaaattcaaaaccctaatccagacgaactgatgatcgaagtcgatctctgctatgagctggacccgtatgaattaaaactggatgagatgatcgaggcagaaccggaacccgagatgattgaagggctgcctgcctctgatgcgctgacgcctgccgatcgctatctcgaactgttcgagcatgttcagagcgcgaaaattttccccgacagtaaaacctttcccgactgcgcacctaaaatggacccgctggatatcttaatccgctaccgtaaagtgcgccgtcatcgtgattttgacttgcgcaagtttgttgaaaaccacttctggctgccggaggtctactccagcgagtatgtaagcgacccgcaaaattccctgaaagagcatatcgaccagctgtggccggtgctaacccgcgaaccacaggatcacattccgtggtcttctctgctggcgctgccgcagagttatattgtcccgggcggccgttttagcgaaacctactattgggattcctatttcaccatgctggggctggcggaaagtggtcgggaagatttgctgaaatgcatggccgataacttcgcctggatgatcgaaaactacggtcacatccccaacggcaaccgcacctattatttgagccgcagccaaccaccggtttttgcgctgatggtggagttgtttgaagaagatggtgtacgcggtgcgcgccgctatctcgaccaccttaaaatggaatatgccttctggatggacggtgcagaaagcttaatccctaatcaggcctatcgccatgttgtgcggatgccggacggaagcctgctcaaccgttactgggacgatcgcgacacgccgcgtgacgaatcctggcttgaggacgttgaaaccgcgaaacattctggtcgcccgcccaacgaggtgtaccgcgatttacgcgcgggggcggcctccggttgggattactcttcccgttggctgcgtgatactggtcgtctggcgagcattcgtaccacccagttcatccccatcgatctgaatgccttcctgtttaaactggagagcgccatcgccaacatcagcgcgctgaaaggcgagaaagagacagaagcactgttccgccagaaagccagtgcccgtcgcgatgcggtaaaccgttacctctgggatgatgaaaacggcatctaccgcgattacgactggcgacgcgaacaactggcgctgttttccgctgccgccattgtgccactctatgtcggtatggcgaaccatgaacaggccgatcgtctggcaaacgccgtgcgcagtcggttactgacacctggcgggattctggcaagcgagtacgaaaccggtgaacagtgggataaacccaacggctgggcaccgttacaatggatggcgattcagggatttaaaatgtacggcgatgaccttctgggtgatgaaatcgcgcgaagctggctgaagacggtgaatcagttctatctggaacagcacaaactgatcgaaaaataccatattgccgatggtgttccccgcgaaggcggcggtggcgagtatccgttgcaggatgggtttggctggactaacggtgtggtacgccgtttaattggtttgtacggcgaaccataatatttttacagccagccgctaacttcctgctggctgtaaaattatcctcttcaggaggagatatttaacatcattgccgcctgggtgcgatttttcacttccagacggcgatacagggattccagatgcgcttttaccgttccggtactgatattcagcgctctgccgatctccttattactttcgcccgccgctaacatggttaaaatctcccgctggcgggcgcttaagcttttgagatctttaatgtccttttccggcgtcgtccgccagtctccaggcagaaacatcatccccatcgccgcactatttaccgccaacgcaaatgtctcgacggtactatcacgaggcacaatggccagcacattaaaatggataacttcctgtaaccaccgtttattgcaatccgtcgccgtaattaacaccttaacctcaggaaattgcaccacggttttttgcagcaaccagtagcaaaactcaccatcctgatcgccatcgagcataactaaggcttcagggtaactttccagcttttgccataactcgtctgcctgactggccccctgaatactcactcctggaatacgctgctgtaaactgattttcattccatgaataaatatactctgcctgtcaaacatgactatttgcataactgaatctccacctgaatacgttaaaaagacttaagtagtggaagggtattacccgcgagaaaaaataagaattcgccatttggcggtggccattctacagagatgacgtgtagaaaatagttaccgatataaatagttacagctaaacgcctgaaattacatgtcgagggcactatttaaaacaattttgaggatttccttatattggtggttagtacgcatgcaattaaaaatgaaattccgcgaccacaagccaaaataacaaacggcaaggagacaaaaataagcacaaatagccaacacgtcctctgttcactttaaagggaatcgctgaaaaatacgctctgtttaaggggattcacctttctcagaaagctattccgcccttttcctgctgagaaatcgccacattcggcatgacaacattgtgaaacccggcattagatgttagaaaaaacaataaacaatgcgatatgcgcgttactgtttcgctgtgaacaacaaagcgtcaaagaaatggataaaattcacgcaatgcagttgttcatcaaagtcgcggagctggaaagtttttcccgcgcagcggatttctttgctttgccaaagggaagtgttagccgccagatacaggcactggaacatcaacttggcacccagcttctccagcgcaccacgcgacgggtcaaactcacgccagaaggcatgacctattatcaacgagcaaaagatgtgttgagtaatctcagcgaactggacggtctgtttcaacaggatgccaccagtatcagcggtaaattacgcatcgacatcccgccaggaatcgcgaaaagcctgttactgccgcgcctgagcgaatttctctatctgcatccgggaattgagctggaactgagtagccatgaccgtccggtagatattcttcatgatggttttgattgcgtgatacgcactggcgcgttaccggaagatggcgttatcgcccgtcccctcggcaaactgaccatggtcaactgtgccagtccgcactatctgacgcgctttggttatccgcaaagccccgatgatctgactagtcacgcaatagtgcgttatacaccgcacctgggtgtacatccgttaggttttgaggttgccagcgttaatggcgtccagtggtttaagtctggcggcatgttgacggtaaacagtagcgaaaactatctcaccgccggtcttgccggtctggggattattcagatcccgcgcattgccgtgcgcgaagccctgcgtgccgggcggcttattgaagtattacctggctaccgtgccgagccgctctcccttagcctggtttatccgcagcgtcgggagctttcccggcgtgtaaacctgtttatgcagtggctggctggcgtaatgaaagagtacctggactgaccgactatactttttaagaatgaccacgacagaaggacaaaagagcggatgacgcaggaaaacgagatcaagcgtcccatccaggatctggagcacgagccgattaagccgttggataatagcgagaaaggcagcaaagttagccaggcgctggaaaccgtcaccaccactgccgaaaaagtccaacgccaaccggttattgcgcacctgattcgcgcgacagaacgctttaacgatcggctgggtaaccagtttggtgcggctatcacctatttcagttttttgagcatgataccaattttgatggtgagctttgccgcagggggctttgtgctggcctcccatccgatgttgctacaggatatcttcgacaaaattctgcaaaacatcagcgatccgacgctagccgccacgttgaaaaacaccatcaacaccgccgttcagcagcgtacgactgtagggcttgtcggcctggcggtggcactttattccggcatcaactggatgggtaacctgcgtgaagcgattcgtgcccagagccgcgatgtctgggaacgcagcccgcaagatcaggagaagttctgggtaaaatatctgcgagattttattagcctgattggtttgttgattgcgctgattgtgacgcttagcatcaccagcgttgccggtagcgcgcagcaaatgattattagcgccctgcacctgaacagcattgagtggctgaaaccgacgtggcgattgattggcctggcgatttccatcttcgccaactatctgcttttcttctggatcttctggcggttgccgcgccaccgtccgcgcaaaaaagccctgattcgcggaacatttctggctgctattggttttgaagtgattaaaatcgtgatgacctacaccctgccaagcttgatgaaatccccctctggcgcagcatttggttccgtgctggggctgatggcatttttctacttcttcgcccgtttgacgctgttttgcgcggcgtggattgccaccgccgaatataaagacgacccgcgaatgccggggaaaacgcagccttaaaataggccggatgcggcgtaaacgccttatccggcatacgattttattcggcctggctccccgtaggccggataagatgcgccagcatcgcatccggctataatgcgcacataacctcttgaaactcgtccccagagcctcttcagccatctatttgggagcaaacaatttcattccaactcataaccccagcatataaatccagttggtaacttttatttaacctgaaaccagttttatccactatttataaaattatgtgaagcatttcatagaagaaaaatcactggcctaaacattatcccctttttgcctgatttttgaccatttccgcgatttgttacacattgaaatatcacttttgctgtgcgtaatatggctattcgttagccaaaaaataagaaaagattatgcaagcaacagccacaacactcgaccacgagcaagaatacacgccgatcaacagccgtaataaagtccttgtcgcctctctcattggcacagccattgagttcttcgacttttacatttacgccactgcggccgttattgtgtttccgcatatcttcttcccgcagggcgatcctacggcagcaacgctacagagcctcgccaccttcgccatcgccttcgtcgcgcgccccattggctctgccgtttttggtcattttggcgatcgcgttgggcgtaaagcgacgctggtcgccagcttgctaacgatggggattagcaccgtggtgattggtctgctgccgggctatgccacgattggtattttcgccccgctgctgctggcgctggctcgatttggtcagggtctgggcttaggcggtgaatggggcggcgcggcgctgctggcgactgaaaacgccccaccgcgcaaacgtgcactgtatggctcctttccgcagctgggcgcaccgattggcttcttctttgccaatggcactttcttgctgctttcctggctactgaccgacgagcagtttatgagctggggctggcgtgtgccatttatcttcagcgcggtgctggtcattatcggcctgtatgttcgcgtgagcctgcatgagagcccggtgtttgagaaagtcgctaaagcgaaaaaacaggtgaagatcccgctgggtacgctgctgaccaaacatgttcgcgtaaccgtactgggtacgttcattatgctggcaacctatacgctgttttacatcatgacggtctactctatgacctttagtaccgccgccgcgccagttgggcttggcctgccgcgtaacgaagtgttgtggatgttgatgatggcagttattggttttggcgtgatggtgccagtcgctggattactggctgatgcctttggtcgccgtaaaagcatggtaatcatcaccacgctgatcatcctgttcgcgctgttcgcctttaacccactgctcggttctggcaacccgattctggtttttgccttcctgctgctggggttaagtctgatgggtctgaccttcgggccaatgggtgcgctgttaccagagctgtttccgacagaagtgcgttacaccggagcaagcttctcttacaacgtagcgagcattctcggggcttccgttgcgccatatatcgcagcctggttgcagactaactacgggctaggtgcggtggggttatatctggcggcgatggctggcttgacgttaatcgccctgctgctgacccatgagacgcgacatcagagcttgtaataagagtgaaaagcctgatgcgctacgcttatcaggcctgaatttccatacaatatattgaattcgcaaggatttgtaggccggataaggcgttcacgccgcatccggcatgaacaaagcacactttgccaacaatctaaatctgtttaattgccggatgtcagacatccggcaattatcatcacttcttcatctggctcaaaatcgtccgacactgattagcctccccttcggaaggactgatcagtgccagtaacgccgccgccggtgttaccagcgttgccagtgccgcagcaacagcaccacgggcaatcagcggtccggctttcaccccagcctgcggatttttaaacgtcccccgcacatacagcgggctacgcagtgtgataatccgaattcctttactctccggatcaatagtcaaatccagctgttcgctagcaaaacttgccgtgccggtaacattaatcaacgcgttctcagtatcgaaagcaaaaatctgcgggcgcgccacgccgttggcaatattcagattcgccgccgcgcagttcacccgcacctcatcatcaccaaatatcgcaccgacaatgtagttgccgacattcagcccaacaatctccatcaggttgcggctcaccagcccgtcattcatcaacagtttcaggttgccgttactgttgcctaaaagtgccgccacgctgttaccgctaccgcgtagttccgcgtcaccgttcatttcccccagcgtcttctgcatcagttccacatcgggcatcagttctttcagtttcagtcgacgagcctgaatatctgcccgcccctgcatcggctttttatcgccttccagatgaatattcgccgcaatgctgccgcccgccatgccaaatttcagcggttgcaggcgcaggtcagcatttttgaggatgatatgagtagaaagatcgctaatcggcaggctactgccatgctcaatgcgccgccctttgaagcgaacatcggcatccataacgtcccatttatcggtttcgaagcggtcataaggcagcactttgcccgcaggctgaacgcttttttcgcccttcttctgttcagaccgtttgctcttttctgcccctttcccggaatcaacgccaatcaacggtcccaggtccgccagccgcaattgccggctctcgacatcaccttccagttttggtcgtggctttccggtggtgtagaccagagaaccgtggatatcgctatcaccaattcgcccattaaaaccgcgataatcaaagacgctgcttttttcagtgtcgattttcgctaccagccgaccatccgtttcaaacggcggggtatcgggcagcagaacgcccgtcagttcatagagatcacccagactatcgccagaaaatttaagccgtaaatcgacaccgcccatcttcattgggtcattcacgacgccatcaaaagcaacacgggtgttaccagagcggaaatcagcctgtaccggaaacggcgtcccttcgccacgcagcgccagcataccgcctatttttcccgtacccgtgagcggttcaccgttatatcgtccctgcgccttcaggccaaaaacgtaatcgcccaccttttctttatccgctttacctttgcttccagtaacttcgctgaacggcagcggcttgcctaagggatcaacaaaaatctccagatccgctttgcttactttgtcatcaatggcgatccgcccttgatcgaaaagaatattatccagccgaaagctccatgcgctcggctttgcattcgcgtctttgttatcatcgttggcaagattaaacgtccagttattgttcttttcagagaggcgaatcaggcgcgcgtcgggcttttcgagcttgatccacggcagccagaccgttttggtcagcagcgccagcggggccagcgttgcctctacgcgtggcaaatgcaccatcgtgacttcgggaatatccggtggattgccaagaatgatgtcttccgcgtgtacatggggccacggcacccagctgcgccagccagtttcttgtttttgccgctcccacaccacgcccagatcgccacggatagcgaacggacgattcaactccgcagagactttctggttgatagtcggtttgagtcgattccagtcaaaagttgcaatcaaaatgatcgccacgacaatcaacaacaagaaagccccactaatcgcagcggttattttgcctgccttgctcatcgttcgcttcctcatattcttcctgtgccagtcctaaagatagtccagccaggcggaaaatgaggcagcttatagcgccagaaccgccgtattcagcgtttctatcggtgccgggcgactaagaaaccagccttgtgcggcgaatgcggggctgttctgaacatcacgccactcttccggcgtttctacgccctcgacaatcaccccgcgacaatagcgattcattagatgtaaaagctgagaaaagagtgtgcgtccttccgggctctgacgcagcatcacaaacagttctcgcgcgattttgatgtagtcataacgcacttcacttagcgcagagaaatttgccatcccggtaccaaaatcatccagccacagcgggccaaattcacacatgctggcaaaggtactatctttcggcagacggatatgctccaccagttcgaaacgcagccagggaagacgctcaatctggcgcaggatttttggttgctgacgcagggcgatgagcgtagggccatcaatattgacgcttgccagcaggccgtgctctataaagaagtcggctttttgcgccagcaaatcaatctgctctttcacaacctccatccgatggctgacggtgatttcagtaaaatagcgatccggcggcaggcgttggctagggttcaagggatgcgtgaccaccgttaatagctccacggccattaaccgcccgcatgtttgatagatcggctgccaggtgtaagcacgctcacactgcaaccaaaaacgccgttcctgcaagctctcgatgcttgcttcagggttgcttattcgctggataacctgccttatcatcaaagatgtcctgtgtttaaaagtgatgctgcccggactcgacaaagattatcggcgcgtaagggcagaactttaccgcctggccggggtaaatttcctcactccacaacggaatctttcaggaatacgttctggctcaaaaaaataatggaacactgttttaatatggttgaccagcaaaccaccacagcgcaaactaacgctaattttttacagatcaggttcacgactatgtccaaaaagattgccgtgattggcgaatgcatgattgagctttccgagaaaggcgcggacgttaagcgcggtttcggcggcgataccctgaacacttccgtctatatcgcccgtcaggtcgatcctgcggcattaaccgttcattacgtaacggcgctgggaacggacagttttagccagcagatgctggacgcctggcacggcgagaacgttgatacttccctgacccaacggatggaaaaccgtctgccgggcctttactacattgaaaccgacagcaccggcgagcgtacgttctactactggcggaacgaagccgccgccaaattctggctggagagtgagcagtctgcggcgatttgcgaagagctggcgaatttcgattatctctacctgagcgggattagcctggcgatcttaagcccgaccagccgcgaaaagctgctttccctgctgcgcgaatgccgcgccaacggcggaaaagtgattttcgacaataactatcgtccgcgcctgtgggccagcaaagaagagacacagcaggtgtaccaacaaatgctggaatgcacggatatcgccttcctgacgctggacgacgaagacgcgctgtggggtcaacagccggtggaagacgtcattgcgcgcacccataacgcgggcgtgaaagaagtggtggtgaaacgcggggcggattcttgcctggtgtccattgctggcgaagggttagtggatgttccggcggtgaaactgccgaaagaaaaagtgatcgataccaccgcagctggcgactctttcagtgccggttatctggcggtacgtctgacaggcggcagcgcggaagccgcggcgaaacgtgggcacctgaccgcaagtaccgttattcagtatcgcggcgcgattatcccgcgtgaggcgatgccagcgtaaacgcagcatatgcaaaaggctggataaagtgttacccctctatccagctcatccataaatacctgatggttgtgctaactcatcaccatcaggcattactgtgcaggtggaatatccgtcacttcaggatgtacgtcatccgtggcgacagaggtggtcgcagcggcggtagatggggccatgatttgatcccagaccgcctgcaacgctttcatgttaaattccggctcgcctttcggctgcagcagtattaacgccatatcattgctcaactgttgacgcagatcctgatttaacatctctaccgtcaggctattaaggaaatcctgccgcagtttctgatattgctccggcgcgatatcgacaacctgattttgcaagctacgcatccgctgacccatcagaatatcggtatcagctcgtgcataggcggcaaacagtttctgcagctccagtttcttttgcgccactaacgcattgaactcttcttccggcagacctttatcgcgaaccttcgccagttcacgcgccaccagattaaggttgctgttcagcttgtcgtttggactttcgatgttgatggcacactgcgcacgcagatacagcacacggcagtcaaatccaagaccgatgtctttgctgttactggcacttaacgcttgctgaacatgccagaacagcgcctcgcgggccaggtccgcacgccagtagcgcagcagtgcggcactttcacgaatcggctgccacggcgtatcccacatgatagataaccggtcctgacgcaccgcgtcagtcataatactcaccgcttccgcacgcagcggagaaagcgtcggcaccggagctggcgtttcacgtttgcctttcagttcgccaaacgttttgtttatttggtcgacaacgctgcgcgcatccacgtttcccaccaccagtagcgtcattgcatccggggtgtaccatttctgatagaaatctttaattttttccgcttcaacgggttgtttcagcggatcggcaggatcgtgacctaacaaggtactccctttcagacgatagcgccaccagccctctttagtatcggcaggccaggttgccaccatgtcctgactttgcagcgcgtggttgatggtttctggtgtgatggtcaatttgccagtggcatttgccagataagagagcgcttctttcagcaaatcgttacggttattgggcaaactcagattaaacagcgtggtgtcataagagacaattaccggcggcatcgggcgtttagggtcgatcccctgctgccacaaactacgcgcctgtgctgcgtcaaggccaccgctttgcgttagcgcaatacgagggatggcgtgactgtaaccgctctgttgtgtactttcggcgaggctaccggtattaaccagcaggcgaatttcaacacgatcgctgggacgctggggggtggtcagcacttgccactgtaaaccgttggaaagcgtcccctgttgccatgctggatcaggctggagcgcatctgcctgcacatagccagcagtggccatcatcagcaaaccgcccgctaaaagtcgaatttttgtgccctgcatgtgaacccctgatcaactatcctggtaataaaaaaactgcccgttgtcggtcagtctaaatgacgttaaaaacacttcgtgttagaccgcaagaacatgaaaatgtcacggaagaagtgaaataaacctgaactcacccaggtggtaagttcaggcacaggggtcaattatgcgcaaacacccgcactcggggaagggagtgcgggcataagtgatgagattaagaggataattcgtgcgttttgccatccggcgcacgattattcagcacatcgtccagttttttgtggtccagttctttcacccacttagcaacgacaatggtcgctacgccgttaccgaccaggttagtcagcgcacgagcttcactcataaagcggtcgataccgaggatcagcgccagacccgctaccggcaaatggcccaccgcagagagcgtcgccgccagcacgataaagccactacccgttacccctgccgcccctttagaagaaagcagcaacacgattaacagcgtgatttggtggacgatatccatctgactgttagtggcctgggcgataaacaccgccgccattgtcaggtatatgcttgtgccatcaaggttaaagctgtagcctgtcgggatgaccagccccaccacgcttttacggcagccgagtttctccatcttgtcgagcatacgcggcagcgcgctctcggaagaactagtccccagtacaatcagcagttcttcacggatgtagcggataaatttgaagatactgaaaccagtcgctttagcgatactacccaataccagcaccacaaacaggatacaggtaatgtagaaacagataatcagctgccccagttgcaccagtgtgccgacgccgtatttaccgatggtaaacgccattgccccgaacgcaccaataggtgccagacgcatgatcatattgatgatgccgaagatgacctggctgaaactttcgatgacgttaaaaatcagttggcctttgctgcccagacggtggagcgcaaaaccaaacagtacggcaaacagcagcacctgcagaatgttaccgctggcaaatgcgccaatgacgctcgccgggatgacatccataatgaaggcgacaatgccctggtctttcgcctgatcggcgtaaaccgctaccgctttcgcatcaagcgttgccggatcgacgttcattccggcaccaggctgcacgacgttaacgatgataagaccaataatcagcgcgatggtactgacaatttcaaagtaaagcagtgcgactgcgccggtacgaccgaccgccttcatgctttccatgcccgcaatgcccgttacgacggtacaaaagatgacaggagcgatgatcatcttaatgagcttaacgaagccgtcgccaagcggtttcatttgctcgcctatttcaggatagaaatggccaaggagaataccaatggctatcgctgtcaggacctgaaagtaaaggcttttaaacagagaggttttcatagggtgtcctttagtaaaaccacaggtcttgtaaggttatggggtacctgcggccttaaaataacacccagacaacatcacagaaatgtacctggatcataattgaaacaaaaaggttaaaaagtttgagctggctcgcacaaaccagcactttttaaagttttgtaatcagtttggggtagttacttttcttccaggtaactctcttcgaagatttcaatagggagtgggcgagcaaaaaggaagccctgggcaataccaacgcccgcttttgccagccagtcgcgttgtgcttcagtctccacgccttcggcaatcatttgtaagttcaggctctgcgccagcatgataattgcagcaatcatgctgctatctcccggcaagccttcaacaaacattttgtcgattttcagtacgtcgattggcaagcttttcatatgctgcagctgacgcagccctgcgtagcccatgccgaaatcatccagcgccacccgaactccggcattgcgcagcggacggaggattgccaccgcagcatgagggtcgtcaatacgtcggctttctgtcacttccagaatcagtgttcccggctgaatgcgatagcgggttaacagttccagcatatccgccaccatattcgggtgcatcagttgcagcgcagagaggtttacgctcaagggcagcataatgccgcgctcttgccaggctgcaagcaatcgacaggactcttccagcacccagtgaccgacggtaaccatcagcccacagcactcaatgcgatcgattaagccatccggcaggtcccaactgccatccggttactggatacgcagtaacacttccgcactgaccagtttaccgctggtcatctcgacctgtggctgtaaccaaatagcaaactgatgattttccagtgcattaaggatatcgctctcttccgtcaaccgcttctgggcggcttccatctgctgcggatcaaagaactgaatctgattcttgcctttatggcgagcggtaaatgccgcagaaatagcgcgactgtaaagctgttcggcggtgagatcgccgtagaacatcgccacgccaatgctacagtgcggacggagttgaatacgttcaatcggcaggcgctcgctcatgatagtgagcacttgctgacctaaggtgattgcgtgccacggttcctgtacaccgttggcaatgacagcaaagtcataaccgctaatctgcgcgaggatcatacgtgggctcagtacgcttttgagtttttccaccagcgtcagcagcagaatttctcgttgcgcctctttcagcacgcccgcagtatcacgcagggtttcacaggtgatgatcatcagcgcggtggtttgtttacgcgcgacaacctgctccagcatctccatcagcaaggctttgttcggcaaatcgctcaccgggaagcgcatcgcattttcgttctgttcttcataatggcgctgcagcaattgctggttgaggttgtaactgcgcaccaacataccgatttcatcgtcctgatgcagacgcggtaatgccagttggtgaccaacaagctccttggctgggatggcgttaagttcgcgagcaatattgcgtaacggatgcaaaatcaggcggttaatgcaccagctgatggcgacggtcaggataaggctcaaaagtaagtaaatggtcactaacgtactgagggtgctcatcacgaacttatacatacggaaggaatccgcctgtagtaccagataggcaattggctgcgggtttgccggacgttcgaggctgtaaacgcccaggctgatttgaaccggtagctcaaacaggcgagtaaccattaccggcaccgggcgctctggaataaaacttttacgcagcgcctggaactggttaggcagcactacatcggcacggctgaccacgcctgccggtttaatgctggcaagaatagcttccgcttcgggaatatcgcctttcaaaatagcactagataagggttcgcggacagagcgagcaatgctttccagttgcgtagccgtgttatagcgattctgctggaccagatggaacagcaaaacggtgcaaaaaataaaaacgaacaccaggacaacggctgccaccattgccatctgcttgattgttaacgagcgacttacgcgcaaattgtctccccccggaaatcccagattgccgcccgagtatacccgatcgcagcggcattaagagaggcgctatctgaaaacttaccagtcggcgtaaggtatcagcggctgcggcggtaaatccatgtcaccctgccatccggcggcggaataacgtacgtagagcaggaaatggctgggtgcgtaatctttcgcctgctggatatcaattgccgtgccaacaaaccagttggaagtaacacgtcgttcaagtaatgcccgcgccgtgtagccgaagccctgactgctgccgccatcgttggattgccgcgcagcttcttcctgccagtcggtcgggatcagattcatcagcggataacgcggcatggttttggtgcgactatggctccagctgccagacgcacccagctcccagctccagttttccgtgcgctcccgccacatcaccggtatggcaaagctcaggtattcctgcggactgtagtaaccgccctgaccgagactgtagccactcagatctttgtcgtaatgccagatcatgttgttcaggccgattgtgacgcggcgattgttctggttaatgaccttatagtaatagcccgtcatccagcgcacgcgccagttatcttcgacatttttaccggttaactggtcgccactaaggcttgcccagacgccgtttgcttcacctttatcgtagctcagacttagccccacaccgtcggcacgtacgccaccccattttttcccggtattgctcggggagtctttttgcccaccaaaggccagcaaagaactggagatgggccgacggtgggcgttaacggtgtaacccagcggcccgatatcatcgctgtaactgatgccgccgaccacatccaccacgttgaagcccatcggcgtggtaccgatatcccagctccagacgtcatttcgccagccgaccgccacgctggcaccggaatcgctctggctgcggttgccgctacagtcctgtaatgtacaggtgccccagttgtcatcccatttgccatcggcattagtggagaaactgccgacgttcatattgacgaaatcactgcgaaagaacatccgcccgtcagaatacggcgcatccacctgcaacatggtagtgtgcgctttcagatcggagtaaccaccggtgccgctgctaccccagtaatcgtgctcaagggtgacgttaagatcctgctggcgatagaggtccgccgcatcgctgcgcacgccacgtttcagccagtcatctttctcgtcgttacgggtcagtcgggtaaaggtgtcgttatcctgcggacgcgtcgtagtcacaccggatgcgaccatggcgtctttgtaggtttccagcgcctgcgttggatcgcccgcctgcgcttcaaacttcgcaccatcacgcagcaccatcgcgctttccatgctcggtggctgagattttgcctgcgggatcaacttattaaacgtccgctgcgctgctgcggtatcgccaagctgcgcctgtgccagcgccacgcgccgctgtgtgttcaggctggcgttatcggtagcgggcagtttcgccagctggctacgtgccgccgctttgtcaccggcagcaatatccacttccgtcagaccaagaatggcgtcggcgttagctggctcccgcgtcaggacattctgatatgcagcgcgggcggcggtgtaatcacgtcgttgttgcgcccagtcagccagcgtgaggtcaatacgcgtggaaggtggttgctggcgcagcatcgcttccgcttctgcctctttgccgctttctcgcaggcggttagcggtttccagcacctgatcgctttgcagtcgattaaccagctcctgaatattgctgttccactgcgcacgcggcaggctattgatatgcgccagcgccgctctgtcctggtcatgaccagagaggtacagcccgtaagcgtaaacctgctccgggtcgttgctcttctgctgcgccagattgcgcattaacgtatcggcctggctgcgttgtccggcctgccagagatcctggctaagtcggtaagtaatccatacgctgccggggtccagcgccagtcgttgccgctgaagtgctgccgcctgcgcccatttgccctggttttccagtgcctctgcctgctgtgccagacggtcgttttgcaggctgcgttcgatatcatcaatgctacgccgctgactggcagagaggctggcgataaacgcttcagctttttctgggctttgctggcggtaaatatttgccagcccgcgcacggcgttagtgttgccgctgtccatacgcaaggtctgctgataataacgttcggcggcgggataatcttttcgcgccatcgccacatcgcccagccccagcactgcataactgtcggtgttatcgacattacgcgcctgctggaacaggcgttctgcccggtcaggattattggctttcagcgcagcatcgccctgctggatcgccagccagtagcggtttactttcagcagactgttccatttgtcgttgttgctgctgtgcgggtccagtgcgagggctttttccagattcgccactgcattggcgcgatcgcctttctgagaatacgcctggcccagcgcccccagagcttcactgtctttcgggttcgcccgcaccgcctgttgtagttcgggaatggctttacccgccataccagagtccaccgccgctaaaccttgcgcacgagcgcggaaagcaggatcggccagctgtttttgctgttctgccagttggctttgcgcagccgccacgctatcgccatcactaaagatgctgagatattttttcagcgcgctcacactggcatcactgacgggcatgtctttaatctgcccgtaccagattttagaggccccttcgcgcccggcgttgctttttgccatctgttccaggacggcaaaaccttcgtcacggcgatcgctactaaacagcaatagcgccagattgttttgcaggcccgtattgcccggtgcatccgcattgatgcgttttaactgattaatcgcttcgccacggcgagccggaattttcgccaccgtactccagtactcgacagcaatgtcaccttccggcggcgcaccgttgaacagtttgttgtaactcgccacagcttcttctgcatgaccggtcgtcgcctgcaatcgtgcctgttgcagtgcctgacgaccatccggcgtggaaagtagcatcgtagtccggctgcttttatacgcattactactcggcgctaactggctcagccgatcgagctgtttttgcgcgccatcaatatcgccctgacgtaacaaagaacggaaacgggcggcaacgacgtccgggttattcggatcaataagttccagccgatataagctctgttgcaccagatcttcacgatgggtcgcttcgcctaaccgaacttgctccagcaactgttgctgagcggttggtgctgcctcgaccatcggcatgacggccagaccgagggaaagcgtgaatatgtttagtgtgaatttgcgcattcctggccccagtcaggtaattactttagtgactatttgcgcattcctggccccagtcaggtaataactcaccttttgtgctgaagcggaaacggtgttgatcccagccttgtccaaacagggtcagcacatagttgtaataggcatcgctgccgggaaagttatcggccacgcgctggcgctgaacggcctgcgcatcgcggttttgtaaaaagggcagcatggcggcagaaaaaccgactggtcctttaccctgcgctttccccgtagccacatccactttttccggcggataaccgtttttctcagtgaatgtcgccatcggtttaaaccggttgagcatccgcgctttttgcggatcgctgtcaggcatcatgcctacccacatgtaaacgcggatagcgtcgtagctgctgatcaatgttttttcggcttttagctgccagcctttgtctttctcatagcgcacccagtctgggctaaaacctttcggggcggtttccagcaataaacgttgattggtttcgcgcagcgtggtccacggcgcgccaaagcgggtgaaatactgcgccagcgtcggcggcaggtagctggggttaaaacgccagctgttatcctcagcaaaacccactttgcccggtaacaacatggaacccagcccaggcaccgtcaccacttcctcccgcgcgatacgttttagcaacgcgctgccgatgtcggtataacgctgctctttccacaaacgccccgcctccagcaagctccaggccatccagacatcaccatcggaggcgctattgctgtccagcacttcccacttactgttctctttcttgccccacagccaggcgggcaaacgttcttttaaagaaccctgagcgagattgttctgcgtccagtcgagaatattatcgaaagctgcacggtcgttagccgccagggcagagaacatgccgtaactttgcccttcggaggtggtgattttgcgcgcgtcgctggggtcgatgacgcgcccttcctgactgatgtaatcctttttaaactgctcccaggcaggccaggtacaggctgcctgaacactaaaggcagccagcagcagcatcgtcacgattccactacgcaacacattcatcttcaattactcgttatccgggttaagacgacgacgactaataattcgcagcagacgccacagtacccatgccagcaatatcacactgatagccgccagcaccgccagcagaatcggatggtttgccagcgcataccacacgcgctcgaaccacggcagatgacctacgtaataaacgtcgccaacacgtaggctgttgataccggactcgcggatcaccgcgacgctaccgaacatggtggcgcgtttgccgctatcgttcaccgcatcgttaagcatttcataaccgcgtgggctatctgccaacagcgcaatcacgctgcgctggtcgttatacgggctctggaagccaatcaccgccgccatcgcaccggaagaggtcagcgtactccgggtttctgccgcgcgatcgctctcgtccggcacaatgccggggaacggggtctggcgcatcggtgttttcacccagctttcggtcgcctgcaccaataggtcgatctgcttatcgtctttcagtttgtccgggataccaccgatgatcatgatgtcggcatctttgccctgaatggtgctgccatcatcggtcaccgtcagattaatcgccgggaagcccgtctgtgcgccgataaaaccaacagtattcagcaacgtttccatctgtgcttcgttaggcgctttcggcatcacggtgatggtttggctcagatccgccatccggctgaatgggaagcccgcgttagcaaaggcgcgtagatccggcatcgggatgaagtggtaatacttgctgaagtcgatggtggagtcgtcaccaatcaccacatgattctgcaccggctggaaggtaatacagttatccacgctaccgcccggcatcgggttcatatactcaaagtcgaagcgcagctggttggtcgcgcccagtttcagcgccggaatagagacatctgttttgccatccagcaaaccttgtaataccggaatccgcagcagcaggcggttcgcctcctgtttgctgctcaggttgaaggattgcaggaactggttattcaggctgatatccatccggctactgtctttcaccggcggcatggtgtagcggtaattaatatccatatcaatgccggtactgcgcatcaggtagagatccggcggcaggtttaggctaacgttaatcgctgctggctcaagaccgctggattgtaactgttcttcataggttttcagttcgccaaatgtgaccggacgatcggtacgtacccagttcggcgcatcgtacggcttacgcggtagcagcggtttcacttcattcactaccacgctttcaccacggaacagaatgttaccctgagcgatacctttcgctgcctgcaacaggtctttgtcgtcacgaccaaacaccaccagcagtttgacgtaaggattctgcggatggttaatcatctcaatcaccggggcttttaccgccggatgatcgcgcaggaagtccggccgtttgtcgttggttgcaaagacaatggcattgcgatccggcagttggttatagagtaccgggaagttctgcccacgccagccagaacggctaccaaaccagctggcgacaatggcagaggcttgttgcagcccaacatccggcgcacccgcaaagaccatcggcaaggtgttggtgcggttatcgctcgggtcaaagaatggcaccgggaagtgactcaggtcattcttcacattcagggtctgataggtcagatccagtccactgctccgcccaacatccagccaaagcgtggtgctggccggtttttcgcacacgtcctgataatggccgacaaactccagccgtacacggttgaagtcgctaataaacagtgggttaatgggcatttgcgccagcgtttttttacccaactgttctttggtcactggcagcacgcccatcagttcatcattgagataaacctttaactggctctggacaggcagtaagcttgggcttggggtgtattcgaagttgagcatcgccttcgtcaccacttcatcgctgcgcataccaaactcaatgctgccgttcgggttaatgccacgtagcaccatgctgcccggcggcggtgcaatttgcgcaaaggtcagcttcacatcacggctaggaccgttctgcgccacgactggcgcatcagcgccctgcacgcccggcatcacttgccccacctgcggattttgttccgtctgggcggctacagctggctcagcattgatcagtggttgcgttgctggcgtcgcctgcgtcatgaaagaggggaacgcactcatccccatagccactgcacaaatccagaatagttttcttttcatcgcgttatcatcattgttgagccaaagcctgatcgcttggttgtgccgtttcgctccgctccgggcggcgcggaataaagcttacaacccaggaaaccagagaagtcagcacacggaatatgcccttcacgctagaaggcgcaaactccgccagatggcggtagccacggaagccgagcttcagaatatccagcagactttccagcggcttatcttccgggtagctgtcctgccagagcgcccatgtatccgcacgggcaaacgtacactgcacaaaatcgatatgttgctgggtggtgagcggcattaatttcagcccaacttcattacccatcacgcgcgccacctgggtcgggaagacgtattcctgctgaccgcgtttaagcaacagattcactttctgcccttccagaatctgcgcctgaccgttgatcttgatccccaaaccaccgtcggagaaatcctgaacggtacagctgaagaggtgaccatcttcgcgggcaattgccgcgggcatcgtcatctccacgcggtggcttcggcgtacctgtttgctttctacgcttaccgcaactgcgccgccaagaacaatcaggttgtagaacacccacaccatactgacgaccacggtgagcatctcggttggcgggccatagaagtagcgccagatgcctaccgcaacgcccaccaggttgagcaggacaaggaagatgtagggccggctgatcacccagtcgacgtactcttcttccaccagtccacctttggcggtgacgttaaatttgcctttgtgcgggttaatcagcgccaccagcgtcggtggtgcgatataccacgccagcaccgtttcgtagatttcactccagaaagagtggcgatatttgccctggatcttggagttggtcaggctggcatggatcatatgcggcagcacgaatagggcgatcatcaacgctggcgcatagatgatgtaggcatgaagcagcaggaacgccagcggcgcagtcaggaagatcagccgtggaatgccgctcaagaagtggaacatggcgttgacgtaacatagccgctgagcaaacttcagccctttaccggtgagcgggttatcgagacggaagatttgtaccatcccgcgcgcccagcgaatacgctgaccgatatgcgcgctcagactttcggtcgccagccccgccgcctgcggaatacgcatatacgcggaggtatagccacgacggtgcaaccgcagagaagtatgcgcatcttcagtcacggtttcgacagcaatgccgccaatttcatccagcggcttacgacgaatcaccgcacaggaaccgcagaagaaagtggcgtcccacatatcgttgccatcctgcaccagaccatagaacagcgtgccttcgttcggcgttttacggaaacgccccaggttgcgttcaaacgggtccggactgaagaagtggtgcggcgtctgcatcatcgccagctgtttttctttcaggaaccagcccatggtcatttgcaagaagcttcgcgttggtacgtggtcgcagtcgaaaatgctcacgaactcgcctttggcatatttcagcgcattgttgatgttgcctgctttcgcatgttcatgagtggtgcgggcgatatatttcacccccacgttttgcgcaaactggcgaaactcttccctgccgccgtcatcaaggatccagatattcagcttatctttcggccagtcgatacccaggctggcgtaaatggtatttttcaccacgttgagatcttcgttgtaagtcgggacaaagatatccacgctcggccacaggctcatatctttcggcaatggcaccggctgacgattcagcggccatactacctggaagtagccgagcaccagcacaatccacgcgtacgtttcagcgaagagcagaataagcccgcacaccaggctgaccggatcgtcccagttcagcgtagaggtgtaacgccaccagatataacggcaagaaacggtcaggctcagcacaatcaacattagcgcgctgaagcgccccggcatccgccgtacgatcagcgctaccccccacagcagcatcaggaagataaactgcgccagcgggttaaacggctgagtaacgcagattaacgccagaatcaggctgaaggtgacgatgataccgaggatcaaccgccgcgccccggcactcaaatgaccgagctcttttttctcatccagatgctgtgttttatggctaacgcgctcaggcagctcgttcatccattgatggtaacgtccacgaatattttgcagaccactaaatgcccgcctgcgcggtttcggcgtttctttgcggcttgcaccgatcaataaccagcatgtttgaatgagataacggaccgggtccagcggacgcggacggctggcgttgatatgcggatacaggtttttatgttctgcgcgaatacgctgccagcgcgggtgctccagcggaataaaaatccaggccaggatcatccagaaacagccgagcgtcgcgctgaaagcgctcgcaccgtgacgacgataatcgcgataacgcccgataagccgcgcgttgaccggcgggataagcaaccaccgggtcaggatactcatgatgcactcccgactggcgtttacatcaacttgcactcccgactggcgttttcagcccggagtagttcaacaggcaccagttcgccagcgtcagtatctcttcagccgccagcgcatcactgcgatattcacctactggttgcttagccgccaggcattcagccatcgcttcatcacgatgaatgagcatcggcagtaatcggcgctggctttgcaaccaaagctggtaaatatcgtcctgaacctgactgccaatacggaagtcattaatcaaaatatgtgcgccatccggcagcgcttgctgatgcagtcggatatggcagttggcatccacattgacgattgccaggctgtgatcgcacaaactcagcagctggtgggttatctggctggcatcacgcggtaagtcgattaaaatccactggtaacgcccgctggcttttagttgctgtaagccggagcaaatatcgctcagccgggtttgccagtgctgtggattttcttgttcttcaatggataactgaccaaaaggcagcaaatcgagctggctggtgtagcgcaacccagcgtcacgccagtcctggccatccagcatcgctctggcccagccctgacggtgggtaaaatcaacattaaaactcaggcgcaacaagttgtccgggcaggcatcgaccaccaggacattttctcccaacatttgtaaactccaggctaatgcggcggtgatggttgttgtccccacgcctccccgcaccccctgctatcccagtacggccattcaccaatcccttacttttgttgcgcaaactctgccagcaacggccagcgttttaatgccgcggccaactgttcgcgttgggaaatatcggcataatcaatatcaggcagactaaatgcctgctttaacgccacaatatcattctggaagatatagcctatcgcgggatcaggcagagtatctggttcattgttattcattttgcttgatccctatgaaataaccgtaccgttcatgagacaattctaaccgtgagcatttcgccggtttattgtttacggcgagacgggaatttgctcactttttgactttccgttacgcaacagaaaaagttaaaaacgaaaagactaaaatcacacgtcttgtgaccttctaaattgattcacatgctaaatctgataagttttaatttcaatggtaggtttatttcttagctttcgctagtaaactgataatcagacaaaatggtgacatgagggacattgtggaccctgtattctctatcggtatcagtagtttatgggatgagctgcgacatatgccagcaggcggcgtctggtggtttaacgtcgatcgccatgaagatgctatcagtctggcgaatcaaacaattgcatcccaggctgaaaccgcacacgtcgcggtcattagcatggacagcgatccggcgaaaatctttcaattagatgattctcaagggccggaaaaaataaaattatttagtatgctaaatcatgaaaaaggtctatactatttgacccgtgatttgcagtgttctattgatccccataattacctttttattcttgtttgcgcaaataacgcatggcaaaacattcctgccgagcggcttcgcagttggttggataaaatgaataaatggagcaggttaaaccattgtagccttttggtaattaatcccggaaataataacgataaacaatttagtttgttgcttgaggaataccgtagtctttttggtcttgccagtttgcgttttcagggtgaccaacatttgctggatattgccttctggtgcaacgaaaaaggggtcagcgcccgtcagcagcttagcgttcagcaacaaaatggtatctggacattagttcaaagcgaagaggcggagatccaaccacgcagcgacgaaaaacgcattctgagtaatgttgctgtactggaaggtgcgccgccgctaagcgaacactggcaactgttcaacaataacgaagtcctgttcaatgaagcccgtaccgctcaggcggcgacggtggtcttttctttacagcaaaatgcgcaaatcgagccactggcccgcagcattcataccctgcgtcgccagcgcggtagtgcgatgaaaatcctcgtgcgggaaaataccgctagcctgcgcgccaccgatgaacgtttgttattggcctgcggtgcaaatatggttattccgtggaatgcgccactctcccgttgtctgacgatgatcgaaagcgtgcaagggcagaagtttagtcgctatgtgccggaagatatcactaccttgctgagtatgacccagccgctcaaactgcgtggtttccagaagtgggatgtgttctgtaatgccgtcaacaacatgatgaataaccctctattacctgcccacggtaaaggcgttctggttgccctacgtccggtaccgggtatccgcgttgaacaagccctgacgctgtgtcgccctaaccgtaccggcgatatcatgaccattggcggtaatcggctggtgctgtttctcagtttctgtcggattaacgatctggataccgcgttgaatcatattttcccattgcctactggcgacattttcagtaaccgtatggtctggtttgaagatgatcaaatcagtgccgagctggtgcagatgcgcttgcttgccccagaacaatggggcatgccgctgcctttaacgcaaagttctaaaccggtcatcaatgccgagcacgatggtcgccactggcgacgaataccagaacccatgcgactgttagatgatgctgtggagcgcagtagttgatataagatgctgtggagcgctcatcatgatgaccatcagcgatatcattgaaattattgtcgtttgcgcactgatatttttcccgctgggctatctggcgcggcactctttgcgacgcattcgcgacaccttacgtttgttctttgctaaacctcgttatgttaaaccggccgggacgttacgccgcacggaaaaagccagggcaaccaaaaaatgactcaatttacgcaaaataccgccatgccttcttccctctggcaatactggcgcggcctttccggctggaacttctattttctggttaagttcggcctgttgtgggcgggatatcttaacttccatccgctcctcaatttggtgtttgccgcgtttctgctgatgccccttccgcgctacagcctgcatcgcttgcgccactggattaccctgccgatcggctttgctttgttctggcatgacacctggttgcctggcccggaaagcataatgagccagggtagccaggtggcggggttcagtaccgattatttaatcgaccttgtcacacgctttattaactggcagatgattggggccatttttgttttattagtggcctggttattcctgagtcaatggattcgcattaccgtttttgtggttgccatactgctatggctgaacgtacttaccctggcgggaccaagtttctccttgtggccagccggacaaccgacgaccactgtaacaacgacgggtggtaacgcagcggcaaccgttgcggcgacgggtggcgcaccggtagtgggtgatatgcccgcacaaactgcaccgccaacaacggcgaaccttaacgcctggctgaataatttctataacgcggaggcgaaacgtaaaagcaccttcccgtctagcctgcccgctgatgctcagccatttgaactactggtgattaacatctgtagcctttcctggagcgatatagaagccgccgggttgatgagccatccactgtggagccatttcgatattgagttcaagaactttaactccgccacctcctacagtggcccggcggcgatccgtttactgcgcgccagctgcgggcagactagccacactaatctgtatcaaccggcaaataacgactgctatctgtttgataaccttagcaaactgggctttacccagcacctgatgatgggacataacggccagttcggcggttttttgaaagaagttcgcgaaaatggcggcatgcagagcgaattgatggatcaaacaaatctgccggttattttgctgggctttgatggtagcccggtttatgacgataccgctgtgcttaaccgctggctggacgttaccgaaaaagataaaaacagccgtagtgccacgttctacaacacgcttccactgcatgacggcaaccattatccgggggtcagcaaaacagcggattacaaagcgcgggcgcagaaattctttgatgaactggacgccttctttactgaacttgagaaaagcggtcgtaaagtgatggtggtcgtggtgccggaacacggcggcgcgctgaagggcgacagaatgcaggtatctggcctacgtgatatccctagcccgtctatcaccgacgtccccgttggggtgaaattcttcggcatgaaggcaccgcatcagggggcaccgattgtcatcgaacaaccgagcagcttcctggctatctccgatctggtggttcgcgttctcgatggcaagattttcaccgaagacaatgttgactggaaaaaactcaccagtgggttgccacaaacagcaccggtctccgagaacagtaatgcagtagttattcaataccaggataaaccgtacgttcgcctgaacggcggcgactgggtgccttacccgcagtaagaacgaaaaaggccgcagagtttcccccctgcggcctggtccgggcgcaaattgccattacggcagcctgacgcccgcatgacacgttacttccgcttgttcagccagttcacgatcatactggcaagaatgccagcaatgaccggagccgctaaatcatgccagaaggccatgcccagctctgcgaacgtcatatagccgcctgtgttgtaatgacaacgtttcgcggctattcttgagtggtctagagtcaagattagcccccgtggtgttgtcaggtgcatacctgcaacgtgcgggggttttctctctccagcaaccaatgccaccagggataaagcccccgcaacattgcgcctcaccggaacctttccggcttgccgctgattctacgattgctttttactgtcagcacccggcaatcttcctcattgcgcgatgccttccagcttaatttctttatttgcaatagttgcagttcatatccgggctgactccagactggtagtgaaatgcgcaattttgtagaattgcgcctcctcgcgacctccccagtgaatctgttgcctcattttttacatactgcgtattcgacttctccacctgttgcgcaagagaaactgggtttattcatttttgcgaggccgacttctttctggacaggactttatgcagcacaacacactaagcaaacacaatcagaaattgccgtttacacgctacgacttcggctgggttttattatgcataggcatggcgattggtgccggaaccgtgctgatgccagtacaaattggcttgaagggaatttgggtatttattaccgcagcgatcattgcttatcctgccacctgggtagtgcaggacatttatttaaaaaccctttctgaaagcgattcctgtaatgactacaccgatattatcagtcattacctggggaagaactggggaattttcctcggggttatctactttttgatgattatccacgggatttttatctactctctctccgtggttttcgacagcgccagctacctgaaaaccttcggtttaaccgatgccgatcttagtcaatctctactttataaagtcgctattttcgccgtactggtggcgattgcgtctggtggtgaacgattactgtttaagatttccgggccaatggtggtggtcaaagtagggattattgtcgtgttcggttttgcgatgatcccgcactggaatttcgccaatataaccgccttcccgcaagcctccgtctttttccgcgatgtcttgcttaccattccattttgcttcttttctgcagtatttattcaggtacttaacccaatgaatattgcctatcgtaaacgggaagcggataaagtactggcaacccggctcgcgctgcgtacccaccgaattagttatatcacgctcatcgcggtgatcctgttttttgcctttagctttaccttcagtattagccacgaagaagccgtttctgcctttgaacaaaatatcagtgcactggcgctggccgcgcaggtgatccctgggcatatcattcatatcacctctacggtgcttaatatctttgccgtactgaccgcattctttggcatttatctcggtttccacgaggccattaaaggcattattctcaatctgttaagccgaattattgataccaagaaaattaacagtcgcgtgctgactctggcgatctgcgcttttatcgtcattacgttgacgatttgggttagctttcgtgtaagcgtgctggtgttctttcagttgggaagcccgttatatggtattgtgagctgcctcattccgtttttcctgatctataaagtcgcacaactggaaaaacttcgcggatttaaagcctggctgattctgctgtacggcattttgctatgcttgagcccactgttgaagctgattgagtaaaccggagcgcatggccccggttttgtgagttaacgctgcggattttcatcctgatcaacagcaaaacaagctaccagttgaccgccgtagtcttttagctgcggctgcaactgggtgcaggggccgaagcgccgacgacagcgggcgttgaaggcgcaacccggcggtggattcagtgggcttggtagttcaccgctgagcttgatgcgctcgcggcgatcgtccgggttcaggcgcggcgtcgcggaaagtagcgcctgagtgtacggatggcgcgggttattgaagatttggtctttcgttcccttctccacgcagcggcccaggtacatcaccatcacttcatcagcaatgtgctccaccacgctcaggtcgtgggagataaagacataagacagccccaactcctgctgcaaatccatcatcagattcagcacctgcgcgcgcacactaacatccagcgcggaaaccggttcatcggcaatcaccacatccgggtcgagcatcagaccacgggcgatggcgatacgctgacgctgaccgccggagaacatatgcggatagcggtcatagtgctcggttttcaggccgactttcgccatcatgctcagggctttttcccgacgctgttctttgcttaagctggtgttgatcagcagcggctcttcaagaatttgcccgacttttttacgcggattcaggctaccgtaagggttctggaagacgatctggattttctgccgacgcagcttctgcgcctgcggatcgtgcttaagcagatcctgcccctggtaatacagctcgccaccggtgggcatttcaatcatcgtcagcaaccgaccgagggtgcttttaccgcagccagattcgcccactactgccagcgttttgccacgttcaaggttaaagctaacgccatccagcgctttaaccagacgttccggcgcgaacatgcctttcttcaccggataatgttttttcaggtcgatagcctgcaacagcggttgttgcagggtggcctcttgcgtactcatagtgtcggcctcccggcatcatcaagtgggtaatggcatttggactgacgcccgtcagcgagcatattcagcgccggttcttcagcgcgacatctgtcagtggcataggggcagcgcgggttaagcaggcagccgttcgggcggtcgtacttgccgggaacgacacctggcaagctcgccagacgttctttgtcctgagcaaattctggcagcgcacgcagcaatgcctgagtatacgggtgacgcggcgcatggaagatggcgtgcgcatcaccggtttccaccacctggcctgcatacatcacgatgattttatgtgccgcttccgccaccagcgccaggtcatgggtaattaacaccagcgccatgttctctttctgctgtagctccagcagtagttcgatgatttgcgcctgaatggtcacgtccagcgcggtggtcggttcatcggcaatcagcagttttggccgacaggcaatcgccatggcgatcatcacgcgctggctcatgccgccggaaagctgatgcgggtaaacatccagacggcttgccggatcgggaataccgacctgattcagcaggtcaatcgctcgctgacggcgggtacttttgttgccgccctgatgcaccttaatcgcttccataatctggaaacccacggtgtagcacgggttaaggctggtcatcgggtcctggaagatcatcgccacttcggcacccaccaggttgcggcgctctttttcactgatacgctgcaaatcctggccgttaaactccagtttttctgccattacgcggcccggataatcaatcagccccataatcgccagactactgacgctcttaccggagccggactcacccacaatcccgaccacttcgccctgttttacgctgtagctgatgcggtctacggcgcggaacggcgcgctttcgtcgccgaaatgcacgcttaatttatctacatttaataacgccatctcgaacctcttactgcttcagtttgggatcgagcgcgtcacgcagaccgtcacccatcaggttaaatgccagcaccgtcagcaggatcgccagacccgggaaggtcacgacccaccaggcgctttgcgcgaactgcaacacgtcggagagcatggtgccccactcaggcgttggcggctgtgcccccatgccgaggaaaccaagagcagccatatcgagaatggcgttagagaaaccgaggctcgcctgaacaatcagcggcgcaaggcagttcgggaagatgttaataaacatctgacgcatcgccccggcacccgccacgcgagacgcggtgacgtaatcgcggttaacttccaccagcacggcggcgcgggttaagcgcacatagtgcggcaaggcaacgaaggtcagtgccagcgcggcgttaccaatgctcgggccgaaaattgccaccagcaccagcgccagcagcagacttggcagcgccagcatgatatcgaccacgcgcataatgatgttatcgaccaggccgccaaagtaaccggcgatcaggccgagaataacgcccataatcaggcttaacacaattaccagacagccaaccagcaggctcaggcgcgcaccgtacatcaggcggctcagcacatcacggcctacgtcatcggtgcccagcaagtgcgccatgctgccgccttcctgccaggctggcggggcgagcagtgcatcgcggaactgttccgccgggttatagggtgcaatccagttggcaaagatcgcgatgaacagcacgatgacgacgtaaaccagcccgacgaccgcgcctttgttgcgtttaaaatagtgccagaactcctgtaacggggtcatcggcaccggtgcgctaatcactttattttcagtaacctgactcatgatgtccccttacttcttatgacgaatacgcgggttcaccacgccgtacagcagatcgaccagcaagttgacgaggataatcatcgtcgccaccagcaatacgccgccctgcactaccggatagtcgcggcgttgcagtgcgtcaatcaaccagcgtcccagaccgggccagctgaagatggtttcggtcagaatcgcccccgccagcaatgttcccacctgcaggccgataacggtcaccaccggcagcatcgcgttacgcagcgcatggacgataatcacccgcatgcgggttagccctttggcgcgcgcggtgcggatgtaatcctcgcccagcacttccagcatgctggagcgtgtcatacgcacaatgaccgccagcggaatagtacccagcacaatggcaggcaagatcatatgggcgacggcatcgataaagttgccgtcttcaccccagatggcggtgtcgattagcataaaaccggttaacggattggagtcatcgaggaacaccatatcgctcacgcgaccggagacgggcgtcaggttccagtgcacgctaaccagcatgatcagcatcatgccccaccagaagataggcatactataacctgtcagcgccaggccaaccgctgtgtgatcgaaaatggaaccgcgtttaaccgcagccagcacgccgaccggaataccgactgccgtagcaaaaatcatcgcgcagacgccaagttccagcgtggcctggaagcgcggcacgaactcttcccaaaccgggatgcggcttttcatactaatgcctagatcgccatgcataacgccccaaatgtaatggagatactgctgccacatcggtttatctaagccgagttcagccagcagctgcgcgtgacgctctggggagatcccacgttcgcccgccatgatcatcaccggatcgcccgggatcatgtggacaaaggcaaatgtgagaagggtaataccgataaacgtggggatgacgagtcccaaacgtcggagaataaactgcaacataacccggattctctatagtgacccgcagcctggaactgcgtgtctgtattgctcacaaatcaattcccgcccttatcggacagggaatgaagtattgctgccggatggcgctgcacgcagaggcacagcgccaccgggtatacagattgttgacaaagtgcgctttgtttatgccggatgcggcgttaacgccttatccggcctacaaaatcgtgcaaattcaatacattgcagaattttcgtaggcctgataagcggagcgcatcaggcatttttgcctttgccatcagtcttgtatggcttttaattattcgatagagacgttttcgaagtgatgtttgcctaatggatcaaccacatagcctttaacttctttacgtaccggttcaaacacggtggagtgagcgatgatcagtgccggagcctgatcgtgcatcaccacctgcgcttgtttgtacagttcaacgcgtttattgtggtcgtcggtagcacgcgccggttgaatcagatcttcaaacggtttgtagcaccatttactgtagttggagccttgttcagaggcggcgcagctgaacaggatggcgaagaagttatccggatccccgttatcgccagtccagcccatcattaccgtctggtgctcgccatctttcgcacgcttgaggtactcaccccattcgtaggtgacaattttggcctgcacgccgactttcgcccagtctgcctgaatcatctccgccatgcggcgagcgttcgggttatacggacgttgtaccggcatcgcccacaggtcgatggagaaacctttttccagacccgcttctttcagcaaggctttcgctttttcaggatcgtaggtgtagtcctgaacgtcgtcgttatagccccacatggttggcgggatcaggtttttcgcacttacgcccgcgccctgataaaccgctttgatgatcgcgtctttgttcaccgcgtaggtcagagcctggcgaactttcacgtcatcgagtggttttttctgcacgttatagctgagataaccgacgttcagccccggcatttccatcagattgatggatttatcctgcttcatgcgagcgatatctgccgggttcgggtacggcatcacctggcattcattcttctgcaatttcgcgtaacgcacggaagcgtcaggggtaatagagaaaaccagcgtatcgatctgcggtttggtgccccagtagccatcaaacgctttgtagcggatacgggaatctttttgatactgctgtaactggaacggaccggttccgattgggttgaggtccagtttttccggtgtaccggctttcatcatcgcatcagcatattctttactcagaatagaggcgaagtccattgccaggtcagcgaggaacggcgcttccgggcgagtcagcacaaactgaacggtgttgtcgtccacctttttcacttcactgatcagctctggcaagcccatgccttcgaagtattcgtagctgccgccagaaactttatggtacgggttttgcgcgtttttctgacgatcgaagctgaacaccacatcatcggcgttcagttcacgcgtcggtttgaattctttattgtcgtgccacttcacacctttacgcagatggaaggtataggttttaccgtcttcgctgacttcccacttttcagcgaggcccgggatcacttcggtggtgccgattttaaattcaaccagacggttataaagcgggacggaagaggcgtcataggtggtgccggaggtaaacagctgcgggttaaacccttccggagatccttcactgcaataaaccagagttttagcctgaacacttgctgcgacggtcatagccaccaggctgagaccaagcttcagcatcccactctttttcaaggaaatacgcattattctgctccaattgtgatgtttgttgttttaaccctttgcagtgggttgtcgctgcctgaccttttttgttttttgcccggtcgggtcaacgttatgaggtggggatgccgtactaattaacatcagtgtaacagtgcggatcctccataaaatgcccctcgtgacctacaatctgtcaacagaatgtgaaaacgtcaatacagccaaccgggatttacaccaacggtgagaatccacacacaaagattaaaaaaacttcaaacagctatttgcagcagagaaatttgtgctactccaacatgaccagaacaatcagcttaatatttagcaacatttggtgattaagttttatgcatttaatgaaaaaaatctgaggaaaaggtggatatctgagcgattaataccatgaacgctaaaacgcacagcggaaaatgccagggccagccataagtaacgcaaaaaaagatttaagcaaatataaaaaaagacaatggtttctgtcacaaatccgttaatggatagtgagatatggggcgcaaatttggcagggaaatgtgtgtcgtgtaggtcgaataaggcggtcgcgccgcatccgacaatggccggcacatttgcctgatgcgacgctgacgcgtcttatcaggcctacgtcgagtcgaacctccctgcccccggaggttctcatcctcatgagctgcagatgcaaaaaagcctgctcgttgagcaggcttttcgaatttggtcggtgatagaggattactcgccacttcgtggctcgccctgcgggccgttgctggcgcaacgttctctcgcttcgctcgagtcgaacctccctgcccccggaggttctcatcctcatgagctgcagatgcaaaaaagcctgctcgttgagcaggcttttcgaatttggtcggtgatagaggattcgaacctccgaccccttcgtcccgaacgaagtgcgctaccaggctgcgccaatcaccgaatgcggggcgcatcttactgcgcagatacgccctcgtcaatcccttaatagcaaaatgccttttgatcggcgagaaagtcagcaggccgcttagttagccgctgcctcttttgcctgcgggatgtgacaccagttgttgttttcgttaattccaccatccggactagtatagccaagacaacccatgatggtatcgtacagctctacgtgacggcgtggcactttcatgtcggcttcttttttcagctgcgcaaacgcctgcgcattggccggattttccagatatttatcactcatccagaccatcatcggtacgcggaactgctccggcggtgccagttcacgcggcgtgccgtgcaggtgctcgcgttcattaatactctcaccgtggtcagctgcgtagaacacaatcgctttcttatcgcgaacctgatcaatcacgctggagataaagtgatccacataggtcacgctgttgtcataggagttgatcatctgcgctttggtacagccgctatcaacaccaatacattccggcttccactgcgcgaagctacgcggataacgctgggtgtagttaaaatggctacctttggtatgcagaatgatcagatgcttaccatccgggttgcgccctaggctttgctgcatttcgtctaccagcaacatatcatctaccggcttgccacgattacgtggctccgcaccaatctgctcacgataagcaatgttgtccgccatcgtgttgctgtagaaccacatttcgctctgcatagcgtagaggtcagaactgaatcctaactgcttcagaaccgcgaaaatgttctgttcttttaatgtgcgctgcggattatcttccgcgcccccctgacgtacaaacatgcaacgcagactgagtttggttgcggtatcacaggagtaaccacggaacgccgccagatttttctcctgggccagtttcggcgtggtattacgctcatagccgaaaatacccatatggtcccaacgcgtggtttcaccgatgataaacacgacataagtgtcatcaacgttttgcggtgcctgataagtgaatttcttcgccggattaagcaaactattattatcggaagattcatcgacccgcgcccaggcatacagccccaacgcagaaagccagttacttggcagataagagttcgctacgacaccgccataactcggcaaatcaacgccggtcgccctctccactttcttctgctggatatccagcaaacgaatcggtgcccaaaccataatacccgccagtacgacgaccgccaggctgcgaatacgctgccctggggttcgcagttgtcggagcaaggtgtagcgacagcggttattccagataaggataagaggcaatgcactaacggcgattaaccagagaataaagttcagaccaacaacttctttactcaggtcgatatcggtggtcatgacggaagcgatgatgccataaccaatgaccacattaaggaaggtcatgtaatagctggcacctgcggaaaagagcaccaccaggcttgccagaatacgccagctgcggcggccaaacaggctaagaagacgtagtaaaaagaaggtcaccagtacggtggcggccagttcaacaacagcagaaatgcctttccagacggtaaaatcgtgcgcatagctgccgaagcggcggtaaaaaaccgcgccattcataaaaaggccaatatagattgcaagcaaaaagctcagcttctgctgtgtaatgcttttgatgtatctcatgcaaacaaaccctggacaaacaggtgataacaccctgcttagtggcttttcaggcccggcagggaaaaagtgcggaggtagtcagataagtaaaatctacacgcgcgaataagtagaccacagcaaagggaaaaagtgtggggaaagagtgtgcatgaagcacaaatttacaaaaatgcaagtttgaaaagagactttagcgttacaaaaagcagtaaaaagggccagttaattggcccaaattttacgagtcattgtttatacatttcgttgatgcgtttgatgcacacggaagctgaagcccagtagctcgcggctgagcattaaagggagccatgcgcctcacgcaacattttctgctctggctgacgaatcgtcgtagaaagcgccaaactcagaatcagcagggcgaaaatcacgtagaaggtcacatagaagccgccaaacagactggcgataatgctaccacaaatgctaccgataccgaaaccgagataaatcacaccgtagtttttcgccaggttattgaggccaaagaactcactgaccagactcggaaagacggtaatagtgccgccaaagttaaatgccacgcaggcaatcgctgcaaagaacgtcactgcattcaatggtgcaaacagcagggccgccatacccaccaggcttatcacctgaccaatggtaataacacggatacgggcgattttgtcagacagaatacccagcaccagacgaccactaaggttggcgatggaaataacagtgactgcattggctgcggaaaccacatcaaggtgtgccagactttgggcgatatctttcgctaccccaatcacgtacaggccgctcatgcaggcggtcaggaacattaccgctaacatccagtactgcggtttacgcatgctctctgccagcgtgtaatctttctccaccacaccattgctggttttcacttcctgttttggtgcgtctttcattaacgttgcgccgaaaacaatcatcaacagcgcaatcgctccccaaatcacaaaggttttttccagaccgaccgtttccagcagctgcgtgtcgataaatttgaaacccaggctacccagaccataagaaccgatagcgaacgcggagatcagacctttacgctccgggaaccacttcacacagttagagagcgtcagcagataacccgcgccatctgccagtcccaccagcacaccggcgcttaaccacagcatcatcaggttgtcagaatgcgctgtcaggaagaagcctaatcccagcaaaatgccggaagccatggtgacgcgtttaacgccaaaacgttcctgtaatttgcccgcaacagaagagctaattgccagccccagacttaacaagccgaaagagaaagcgacctggcttaccggcgcatccagcttggcggaaagcgcgccattaaacaggctccaggtataaacgctccccagcgcaaactgggtaatgatagtaccgatgagtgtcagccagcgggtacgctgataattactaggtgtcatggcagtattcctgcagtaataaaaaggaaaaatctctgccgacaaccataacgaagtgcactttatgcctggggaaaaacggcatgaaatgccatcagaacggaatgaaatgccttagttcaggaatgaatgacgcgacaattattcaccaaatttattatttggtaagttagcacccactatcgccacaactattgttatttaatggtttcaattgtgactgttacgttaaaatctggcgctaacccccatcgtatacagatagtcgctattattagtggtattttctgcctgagttagcgcggcataggcggcaatattttgattgagcaacatatcagcgcctacggtgacatccagccagttgccgttctggtttgtcgccgtcatccggctcaggccactttgcgccttccagatattctcgccaaattgctggttatagctgatttgcgcccagggtcggagatcgccaagccgggagtcaacacgccagcctaaggtactcacgctggcatgccataacggatcggtcagcgtggtagtactgtcgccaaactcgttatacatgctggtggttgtgccatcgtaatgtaatgccgcgaccgggccggttgtaacctgttcatataaaggaaaattccagcccatactcatactgctggtcacatccacaggggtttcttccgccagattgacttccagtcccagcgccctttggctactttgaatacgttggctcaaaatatcgttgtaatcaggttgatgatcactatcccaggtgtaacgctctgtggaaagtccgggttgcgtatcaacgatatattcttgttgccaggcgtaagctgtgttgagaaaaaaggcactgattaccacgctcgccagcaggcttagctgccagcgaccaccgcttttttttatgatcattaacacgactccagggaagagccgaattcggcaatattattgtcattgtatgaaggatatcgggcatagtagccctgtattaaatattgactttttcaccgatgcgtcaagaaaagcggctgaaatttttacgatcgggtacatagcgagggaaagtatggaacgttgcggctgggtgagtcaggacccgctttatattgcctaccatgataatgagtggggcgtgcctgaaactgacagtaaaaaactgttcgaaatgatctgccttgaagggcagcaggctggattaagctggatcaccgtcctcaaaaaacgcgaaaactatcgcgcctgctttcatcagttcgatccggtgaaggtcgcagcaatgcaggaagaggatgtcgaaagactggtacaggacgccgggattatccgccatcgagggaaaattcaggcaattattggtaatgcgcgggcgtacctgcaaatggaacagaacggcgaaccgtttgtcgactttgtctggagctttgtaaatcatcagccacaggtgacacaagccacaacgttgagcgaaattcccacatctacgtccgcctccgacgccctatctaaggcactgaaaaaacgtggttttaagtttgtcggcaccacaatctgttactcctttatgcaggcatgtgggctggtgaatgatcatgtggttggctgctgttgctatccgggaaataaaccatgattcgggaagcgcaacgtagtgaactccccgcgatcctcgaactgtggctggaaagtacaacctgggggcatccctttataaaagcgaattactggcgtgactgcattccgctggtgcgggatgcctatcttgccaacgcgcaaaactgggtctgggaagaagacggtaagcttctcggttttgtcagcattatggaaggccgatttctggcagcgatgtttgtcgcaccgaaggccgtcaggcgcggtattggtaaggcgctgatgcagtatgtgcagcagcgccatccccacctgatgctggaggtttatcaaaaaaatcaaccggcgataaatttttaccaggcacagggttttcacattgtcgattgcgcatggcaggatgaaacccaactacccacatggattatgagctggccggtggttcaaacgctgtaattaactgctggccggtggttcaaacgctgtaagtgtcagttccggaccgttgtatttttccagccatgccagcgccgtattacccgcacagccattccccagccggctgctggggagatctttggtcagcacgttcactgcgccgtttttacaaataccgtcagcggttaaatccagatccggccatgccccttcgtgaatgcaaatcacgccaggtttaattccctcgctaatgaccgctccggcaagaatttgcccgcgtgcgttccacaaccgaacagtatcgccatcttgtatgccgcgctcctgggcatcgtcaggatgaatggtgacaggctcacgatttgccaccgcgtacaattcgcgcagagaactgtaattcagctggctgtgcaggcggtgcgccggatgggcagaaagtacctgcaactgttctggttcggcattgccctgccattcgtccggctccagccacattggatgcccagggcaatccgggtaaccgtaatcggcaatacgctgactgaagatttcaatcttgccgctggcggtttttaacggatgcgccagcggatcgcggcaaaaatcagcgaagcgaataaaccgctcgctgtccgggttttccggcatctcaattaactggttggcttgccagaactcagcaaatggcggcaattcaacctgctggcttgccccgcgctgtcgggcaacgttataaaacgtttccagccattgcagctcactttttccttccgtaaaacgtgcataaccgcccttctcccagcgttcacttaactcggcaaaaacatcaaaatcattacgcgcttcatagcgtggcggcaccacttgcttcatcggcaccagatgctgattactgtaatcaccggtcatggtgagatcattacgctcaaaagaggtagtcgcaggcagaacgatatccgcgtgttttgccgccgccgtccagaagcattcagagatcaccaccagctccggtttttgccaggcacggatcaggcgattggtatcctgatgatgagtaaagttggcaccgcccgcccaccagataaaacgaatatccgggaaatgtcggttcataccgttgtgttgatatgcgccaccagggttttccagtgcttcaacaatgcgggcaacagggattttatccaccgcatcgcagccacccggcaagctgccctgcatggaagagagcaccgcagaacgccgcgtggggttaccaccattggcaaaatggtaagaaagaccaaaaccgccgccgggtgtgccgatttgccccaacattgctgccagcgtgacgatcatccagtgtttttgctcaccaaactgttggcgctgcattccccagcctgccatcagcatggtggtattttggtggaaaatagccgccagctcgcggattttcgctgcgccaacaccacaaatctctgctgcccattcggcggttttcgctattccgtcactctcgcccagcaaataagaggcgaagacggcataacctgtggtgcaacgcgccagaaacgcttcgtcgtgccaaccattttccaccagcgtatgggcgatccccagcatcagcgcaacatcggtgcccatgtgcggtgccacccactccattttatcgccaaagaaatcgacggtttcgcttcgcattggatcaatgcagatcagctttttcccgctgtcacgcagtgcagaaaagtaagaaagcccctgctcatcggatgcattccacgcaattttcagcgtattgagtgggttagcactccacagcaccacgacatcgctatgttccagcaccagcggccaactggtctgctgttgataaacttcactaccacccacgacatacggcatgatcgcctgtgccgcgccggtgctataatcccccagatgcccggtataaccgcctgccagcgccatatagcgttgtaataatgtgctggccttatgcagcacgccgttactacgccagccgtaggaaccagcaaaaatgcttgccggaccataagcctcacgaatgcgtttatgttgttggtgaataagatccagcgcctcatcccaactcacgcgaacaaattcatcctgcccacgaatgccttgcgggttttccggactcgcaagaaagccttttcgcaccattggaaatcgtacccgcgtattgctgtgaacctggtcgcgaaccgcgctctgcaaggagttttccattcctgtggctaacgcgccacggctgctaaacacggtttcgccgtcggtttcaaccagcatgggcccccaatgggcggcagtcagaacggaatatcgtgaggatgagttggccaaaccgaagactcctgaaaggttagatgtattgagcagttaaatattacttacaaatttccgagtattcccaggaataatcttcatgttcacgcggcataatctcccgccacggaacccgtggcaaagaataaaaaggttattaaggattaacaatgaagaaacgtgtttatcttattgccgccgtagtgagtggcgctctggcggtatctggctgcacaactaacccttacaccggcgaacgcgaagcaggtaaatctgctatcggcgcaggtctgggctctctcgtgggcgcgggtattggtgcgctctcttctagcaagaaagatcgcggtaaaggcgcgctgattggcgcagcagcaggcgcagctctgggcggcggcgttggttattacatggatgtgcaggaagcgaagctgcgcgacaaaatgcgcggcactggtgttagcgtaacccgcagcggggataacattatcctcaatatgccgaacaatgtgaccttcgacagcagcagcgcgaccctgaaaccggcgggcgctaacaccctgaccggcgtggcaatggtactgaaagagtatccgaaaacggcggttaacgtgattggttataccgacagcacgggtggtcacgacctgaacatgcgtctctcccagcaacgtgcggattccgttgccagcgcgttgatcacccagggcgtggacgccagccgcatccgtactcagggccttggcccggctaacccaatcgccagcaacagcaccgcagaaggtaaggcgcaaaaccgccgtgtagaaattaccttaagcccgctgtaatccctttcatgccaggtgatgcagaaatcacctggcattcttcagttttccttcatcatatttcaggctaaggtgatcgccttatcagtgaatggagagaagcatgaagccgtccgttatcctctacaaagccttacctgatgatttactgcaacgcctgcaagagcatttcaccgttcaccaggtggcaaacctcagcccacaaaccgtcgaacaaaatgcagcaatttttgccgaagctgaaggtttactgggtagtaacgagaatgtaaatgccgcattgctggaaaaaatgccgaaactgcgtgccacaagtacgatctccgtcggctatgacaattttgatgtcgatgcgcttaccgcccgaaaaattctgctgatgcacacgccaaccgtattaacagaaaccgtcgccgatacgctgatggcgctggtgttgtctaccgctcgtcgggttgtggaggtagcagaacgggtaaaagcaggcgaatggaccgcgagcataggcccggactggtacggcactgacgttcaccataaaacactgggcattgtcgggatgggacggatcggcatggcgctggcacaacgtgcgcactttggcttcaacatgcccatcctctataacgcgcgccgccaccataaagaagcagaagaacgcttcaacgcccgctactgcgatttggatactctgttacaagagagtgatttcgtttgcctgatcctgccgttaactgatgagacgcatcatctgtttggcgcagaacaattcgccaaaatgaaatcctccgccattttcattaatgccggatgtggcccggtggttgacgaaaatgcactgatcgcagcattgcagaaaggcgaaattcacgctgccgggctggatgtcttcgaacaagagccactgtccgtagatagcccgttgctcagtatggccaacgtcgtcgcagtaccgcatattggatctgccacccatgagacgcgttatggcatggccgcctgtgccgtggataatttgattgatgcgttacaaggaaaggttgagaagaactgtgtgaatccgcacgtcgcggactaagccgcgactgcgtagagtaaagcccgataatcgctcgggcttttactctttattgggttgcagtaactgctgtagtccaggcctgattaaacgcctgatgctgtgccggtaatggcgcaatcagtttgttatattcacttgcctgctgactagtcgggaactggatgccatttgcgacaaagctcacctgagtaccttgctgagcaatgtagtctccaaccatcaccagttgttgcgtgaaagtttgtgccgccggaatcaacggttgcaatgcatcagctggcgtcgttaccactttggtgaatgcctgatcaaagaccggtttcaaatcatcgctctgttttagcgcagagtgcgcagcatcggcctgcaacttcgcattttgcagttgttgcgccagcacacccaggctaccgttcatttcacgcagcggaccgctttgcgtaacgtaatcctgcggtacgcgaattgcgttaacgctgtctacaaccgggcgcagaccggaatccatcgcctgattcacctgctgagaataaccatacagaatcgcgtaatcagagacaaaaggaccaaactgttttttctgatcggcagtcagggttggtagacgttcaccgctacgcatcactgtattctgcaggaagtcgataaacgctttacgctgatcgccttctttatcaaaacacccactcaggctaactaccattaataacgccgcaagaggcgcaaaccagcgagagcaggactttcctgtcgccattttcttactcctttcacccaaaaaaagcgcacaacgacacacgcgtgtctgacgtgacaaggatagtccaggacaggcttgcaggataccctttctacgtaatcttcctggtaaaatcatggagaaaatgaaacaaggttaatttgttgtttcattgttaaaaaatgatagtgccgttgccttttttgtagccagagatttacgccttcgcagaaggttagattttcgaaatctttacaaaacaggagtggtaagagatatatcggcatttatcagatcgttaggtggctataagtcacgctaaatgacaggctgaatcgaatcatagccagagcatgccctgacttcaccccgctgtgtctgcttttcccgactattcttaatgagcttcgatgcaattcacgatcccgcagtgtgatttgaggagttttcaatggaatataaagatccaatgcatgagctgttgagcagcctggaacagattgtttttaaagatgaaacgcagaaaattaccctgacgcacagaacaacgtcctgtaccgaaattgagcagttacgaaaagggacaggattaaaaatcgatgatttcgcccgggttttgggcgtaagtgtcgccatggtaaaggaatgggaatccagacgcgtgaagcctagtagtgccgaactaaaattgatgcgtttgattcaagccaacccggcattaagtaagcagttgatggaataaacttttatccactttattgctgtttacggtcctgatgacaggaccgttttccaaccgattaatcataaatatgaaaaataattgttgcatcacccgccaatgcgtggcttaatgcacatcaacggtttgacgtacagaccattaaagcagtgtagtaaggcaagtcccttcaagagttatcgttgatacccctcgtagtgcacattcctttaacgcttcaaaatctgtaaagcacgccatatcgccgaaaggcacacttaattattaaaggtaatacactatgtccggtaaaatgactggtatcgtaaaatggttcaacgctgacaaaggcttcggcttcatcactcctgacgatggctctaaagatgtgttcgtacacttctctgctatccagaacgatggttacaaatctctggacgaaggtcagaaagtgtccttcaccatcgaaagcggcgctaaaggcccggcagctggtaacgtaaccagcctgtaatctctgcttaaaagcacagaatctaagatccctgccatttggcggggatttttttatttgttttcaggaaataaataatcgatcgcgtaataaaatctattattatttttgtgaagaataaatttgggtgcaatgagaatgcgcaacgccgtaagtaaggcgggaataatttcccgccgaagactcttactctttcaatttgcaggctaaaaacgccgccagctcataactctcctgtttaatatgcaattcacacagtgaatctcttatcatccgggtgaaaaataaaagcgtgaaacaaatcactattaaagaaagtaatctatatttctgcgcattcccagcctcctgtgttgatttccaacgagtataactttgatttatagtcaggtggggcttttctctgtctgcctttcggtgaatacctgagacaaacagtctcaagcacccgtggctattctagcttaataagtttgtttcttctccttgatataatcctaaaaaaatctcataaaattaatatatgagataatctttattcagcagaagattattaaaggttgctgtattatttagcgataaaaaaagcctgccagatggcaggctatttaataacggcgttattattgcaacaggctaatatccgcaacgcgcaggaacagttcgcgcagtttctccagcatggtcagacggttgatacgcaattctttgtcatcaaccatgaccatcactttatcgaagaaagcatcaaccggttcacgcagctcagccagttcgaccagcgcatcctggtaacgaccttccgtaaagtacggctccagcttgtcacgtagcaccacaacctgcatcgccagtttaatttcttccggctctttcagggtagaggcattcacgcggtcgctcagcacttcgtcagatttcgccagaatgttagatacacgtttgttcgccgccgccagtgcagcagctgcatccagggtacggaaatggcttaccgctttcatacgggcatcgaaatcagccggacgagtcggacgacgcgccagtaccgcctggatggtgtcaacggtataaccttcgtcctgataccaggcgcggaagcgaccgagcataaagtcgataacatcatcaactacgttggcattagtcagcttatcgccatacagacgcaccgcttcttcggtcagcgtttgcagatcaaggttgaggttcttctcaacgataattcgcagcacgccaagcgcggcacgacgcagcgcaaacgggtctttgtcgcctttcggatgctgaccgataccgaagatacccgccagggtatccatcttgtcagcaatcgccagcgcacaagctactgggttggacggcaggtcatcaccagcaaaacgcggctgatactgctcattcagcgccaccgcgacatcttccgcttcgccatcgtgacgcgcatagtgcatccccataacgccctgggtgtcggtgaactcgaagaccatgttggtcatcaggtcgcacttagacagcagacccgcacgggtagcgtggttaacgtcagcgccaatctgttcagcaatccagccagccagcgcctggatgcggtcagttttgtcgcgcagcgtccccaactgttgctggaacaacacggtttgcaggcgcggcaggttatcttcaagacgttttttacggtcggtgttgaagaagaactcggcatccgccagacgcggacgaacgactttctcgttaccggagataatctgctgcggatctttgctttcgatgttggcaacgaagataaagttcggcagcagtttgccgtcgttcgcatacaccgggaagtatttctggtcacctttcatggtgtaaaccagcgcttcagccggcaccgcgaggaatttctcttcgaattttgcggtcagaacgaccggccactccaccaggctagccacttcttccagcaggctttcgcttaagtcagcgttaccgccaatcttacgcgctgcttcttcggcatcggctttaatcttcgccttacgttcttcgtaatcggcgatgactttcccacgctcacgcagaatttccggatactgatcggcgttatcgatggtgaattccggctcgcccataaagcggtggccgcgaatcacgcgatcggactgaatgcccagaatggttgccggaatgactttgtcgcccagcagcagggtcacggtgtgcaccggacgcacgaagtgcacgtcgcttgcgccccaacgcatcagtttcgggatcggcagtttcgccagagaagtcgcaaccatattcggcagcagtgcttcggtgctttcgcccttcacatgggcgcgatacagcagccattcgcctttatcggtagtcagacgctcagcctggtcaacggtaataccgcaaccacgcgcccaaccttctgccgctttgctcggtttgccttcagcgtcgaacgcctgggcaatcgccgggccgcgtttttcgatttcacgatccggttgcgcttccgccaggttagctactttcagcgccagacgacgcggagcagcaaaccattgaacggtgccgtgtgcgaggccagcgctatccagctccgcagtaaagttcgcagcaaaggactcagccaggctgcgcagtgcttttggtggcagctcttcagtgccgatttccaccagaaaagttttctcagacatagccgcctcttacttatctttgttgcacatcgggaagccgagggcttcacgggaagcgtagtatgcttctgccactgctttggtcagggtgcgaatgcgcagaatgtagcgctgacgctcggtgacggagatggctttacgcgcatccagcaggttgaagctgtgggcggctttcagaatacgctcgtaggctggcagcggcagcggattttccagcgccagcagctgctgcgcttctttctcgtactgctcgaagcaggtgaacaggaagtccacatccgcgtattcgaagttgtaagtggactgctccacttcgttctgatggaacacgtcgccgtaggtggttttacccagcgggccgtcgctccagaccaggtcgtaaacgctgtctacgccctgaatgtacatggccagacgttccagaccgtaggtgatctcgccggtaaccggtttacactccagaccaccaacctgctggaagtaagtgaactgcgtcacttccatgccgttcagccacacttcccagcccagtccccaggcacccagcgtcgggttttcccagttatcttccacgaaacggatgtcgtgaatagtcgggtccatgcccagctctttcagagaaccgaggtacagctcctgaatattgtccgggcttggcttaatgaccacctggaactgatagtagtgctgtaaacggttggggttttcgccgtagcgaccatcggtcgggcgacgagaaggctgaacataagcagccgccatcggttctggccccagctcgcgcagacaggtcattgggtgagaggttcccgcgccgacttccatgtccaatggttgaacaatggtgcagccctggcgagcccagtaatcctgtaaggtcaggaacaagccctggaaggtcctggtatcaaacttttgcatattatttcgtgctggatacgtgtggatttaaaggaagggatcagtatacccgctggatggaagatatacagtacgaaacgggaaaaagcagggcttaacgcatggaaagatgcaaaaaatggccatccgcgtcaaaagaacagacaaactgctctttacggaaggtataaccgcgcatttcatagcttccctggaactgttcgaaggcggtgacgtcgattttttgctcgccggtgttataacgttttgccgcctgatccttgcataacgcttccatattcaagctacgcagaggatcaacctttacccgttgtgctttctgcacgggactcggtatagaacaacccactagcaccataagcgccattgccggaaagaaagcgttcatcatcattaaattaccgtctggtttgcaggtgagtcttattatttatatcggtatagtggctgatatcttacgaatttccttaagcctctataagctgtagtgataaaactcagattattccagtgcgccaaccaaatgatttatcggtcagactttttttaaccagatacagagacacagatgcagcccaaaatttactggattgataacctgcgagggatagcgtgtttaatggtggtgatgattcacaccactacctggtatgtgaccaatgctcatagtgttagccccgtcacatgggatatcgccaatgttctgaattctgcctctcgtgtcagcgtgccgctatttttcatgatttccggctatctcttttttggcgaacgcagcgcccagccgcgccatttcttgcgtatcggcttatgtctgattttttatagcgcaatcgcactgctctacattgcgctgtttacctccatcaatatggagttagcgctgaaaaacctgctgcaaaagccagtgttttaccacttgtggtttttcttcgcgattgcggtgatttatctggttagtccgctgattcaggtgaagaacgtcggcggaaaaatgttgctggtgctaatggcggtgattggcattatcgctaacccaaacacagtgccgcagaaaattgacggttttgaatggctgccaattaacttatatatcaatggcgatactttttactacattctgtatggcatgttgggccgcgctatagggatgatggacacacagcataaagcactgagctgggtgagcgccgcgctgtttgcgacgggggtttttattatctctcgcgggacattatatgaattgcagtggcgcggaaattttgccgatacctggtatctttactgtgggccgatggtttttatctgcgcaatcgcgctattgactctggttaaaaacacgctggatacgcgtaccattcgcggacttggcttaatctcccgccatagtttgggtatatacggattccacgccttgattatccatgcgctgcgcacccggggaattgagcttaaaaattggccaatactggatattatttggatcttttgcgcgacgttggcagcgagtttgttactttctatgctggtacaacgaatcgacagaaacagattagtgagttaagtaaaagcccggtcacattggactgaccgggcttacgtgagttattcgctgtattcttcctgggtaacctgtgtttcttttggtgggtttattccggcatcacgaatatttttctgcaccgctactgcaccaaacaagcttaagaagaaagccagtccataaaaacctttttcgctgagtaataatgtcgcattccacagacctaccatcagtaatgcaacagagataataaagacagtcaggcaggtcatataataaatggaagtggtcggtatgccttcatacttgtcccgaacggtcttttgataagacgccgcagaaaacagtcctaataccagtacggcaaaataatatcctttttcatttaactgcatctctgcattccatagccctaacagataggtaacgataccaccaacgagagctatccaactcacaatactaaaggccggactataggtacttattttgttgtccatcacagtattcctttcattcctgaatatgtaagagctttatgttgctcatgcgctgcgaaacaaacgcatttgaccaaacaagcagacaaaaaaggcgatgggatagatcaccatttcataagtattgataggtgcgtttaaaacaccgataaacaagagaccgatagtgattaacgcaactaactggcagatatgggtaaaaaaatcatccagttgcccgagtttttctgcgcgaagatatgcatagttgccaaaagttgctgtcattaacacgccaagaaaatagccttttccacttaacaatgggcaactgatccatagcccaaccagataaaccagcgccccgacaacaaataatagtttcgccacagtcttactggttttcataacgatctccatatctaccagcgatacattacgagtaaccaacgaaagacaaaactgaaaaatgccattaacaaatgattttcagaataaattcatactaaatattaattaattactgagatatatagatgtgaattatcccccacccggtcaggcaggggataacgtttacgccattaatggcagaagttgctgatagaggcgacggaacgtttctcgtcgtggctgataagcggcataacgctgcgcatctggtagatggctctgttctaacggtagttgcggcaacaattcaatgaggcttttctctggattcgccgcgatctgcgccagccttgctgcgcccagtgctggccccacatccccccccgtacggtaatcgagctgctgaccgctgatatccgccagcatctgacgccagtactcactacgcgccccgcccccaatcaacgtaacactttgcggtttaataccgcaggcatgcacgacatccatgccatctgccagcgcataacccacgccttccagcactgctcgcgccagttcattggggccatgttgatgagtcaaaccaaagaaaacccccttcgcctggggattattgtgtggcgtacgctcgccggaaagataaggcagaaaccaaactggctcggcactttcatcagcctgttgagctgcagcgattaaagctgggacattgctcaggccggttaatttcgcggcccaatccagacagctcgctgcactcagcatcacagacattaaatgccaacgttgcggtagcgcatggcaaaagctatgtacggcgctttctggcttgcttaagaacccttcgctgacagcaaaatagaccccgctcgtccccaggcttaacattgcctgattagcatcaaccattcccacaccaactgcaccagctgcattgtcgccaccgcctgcgacaactggcaccgtcgccataccccacgctttcgcaacttcaggtaacaaagcaccagtaatttcgctgccttcgtataatgcgggcatctggtcacgagataagtcgcaagcctgcagcatgacgtcactccagtcacgctttgcgacatccagccacatggtgccagctgcgtcagacatatcgctggcaaactcccccgtcatacgcagacgcaagtaatctttcggtaataatactttgtcgatttgacggaatatctccggctcatgccgctgaacccatagcaatttaggcgcagtaaatccgggcatcatcaggttgccggtaatcacccggctttgcggaactcgcgcttccagcaaagtgcactcttgcgcacagcgcccgtcgttccacaaaatggcagggcgtaacacccgttgctgagcatccagcaaggttgctccgtgcatctggccggcaatacccaatgctttaacgtcctgcagagaatgctgatcgcccagagctttcattgcgcgatcagttgcctgccaccactgttccgggtcttgttcgctccagagtggatgcgggcggctaacggtcagcttttccgtttgcgcagcaaccacctcaccctgctcgttgagcaaaataacttttacgccgctggtgccaagatctatcccgatatacatatcgatcgttccttaaaaaaatgcccggtatcgctaccgataaccgggccaacggactgcacagttagccgttatttgtcgaacagataatggtttaccagattttccagttgttcctggcgaccactctgatgcaccggagacaaatgatgttcctgagcatatttggctaaatctgccagactcatttggcctttcaggatttgctggcccaattcgctattccagccggaataacgctgcgcgatgcgtttatccagctcgccatcttcaatcatgcgcgctgcaattttcagcgccagtgccatcgtatccatcgcgccgatatgaccgtaaaacagatcatatttatcagtactttgacgacgtactttggcatcgaagttcagaccaccggtggtgaaaccgcctgctttgagaatttcatacatcaccagcgcattctcttccacactgttcgggaactggtcggtgtcccagcccagttgcgcatcgccacggttggcgtcgacagaaccgaacaggccaagcgcaatggcggtggctatttcatgatggaaagagtgacctgccagcgtcgcgtggttagcttcaatgttcagtttaatctctttttccagaccaaactgtttcaggaagccatagaccgtcgcggcatcgtaatcatattgatgtttggtcggttcttgcggtttcggttcgataagcaacgtgccctggaaaccgattttatgtttatgctcaaccaccatctgcataaagcggcccagttgttcacgctcctgacgcaagtcggtatttaacagcgtttcgtaaccttcacgaccgccccacaggacatagttttcaccgcccaatttatgggttgcttccatcgctgtaacaacttgcgttgccgcccagctgaagacttcaggatctgggttcgtcgccgcacccgcgccgtagcgagggtttgtaaagcagttggccgttccccacagcagcttcacgccgctctcttcttgcttgcctgccaggacatcaaccatttgcgcaaaattattgatgtactcttttaagctcgcgccctcaggggaaacatccacatcgtggaagcaataaaatggcacatgtaacttgtggaaaaactcaaatgcgacatctgctttacgcttcgccaacgccagtgcctcaccaggctgctgccacggacgattaaacgcccccacaccaaacatatccgccccgttccagcagaaggtgtgccagtagcaggcggcaaaacgcaagtgctcttccatacgcttacccaacaccagttcgtcgggattgtagtgacggaatgctaacgggttactggatttactgccttcataacgaacgcgatcgagctggtcaaaataggcttgcatattgaactccataatcaggtaatgccgcgggtgatggatgatgtcgtaatattgggcactccctttcagttgctcaattatgttatttcacactgctattgagataattcacaagtgtgcgctcgctcgcaaaataaaatggaatgatgaaactgggtaattcctcgaagagaaaaatgcaataagtacaattgcgcaacaaaagtaagatctcggtcataaatcaagaaataaaccaaaaatcgtaatcgaaagataaaaatctgtaattgttttcccctgtttagttgctaaaaattggttacgtttatcgcggtgattgttacttattaaaactgtcctctaactacagaaggccctacaccatgaaaataaagaacattctactcaccctttgcaccagtctcctgcttaccaacgttgctgcacacgccaaagaagtcaaaataggtatggcgattgatgatctccgtcttgaacgctggcaaaaagatcgagatatctttgtgaaaaaggcagaatctctcggcgcgaaagtatttgtacagtctgcaaatggcaatgaagaaacacaaatgagccagattgaaaacatgataaaccggggtgtcgatgttcttgtcattattccgtataacggtcaggtattaagtagcgttgtaaaagaagccaaacaagaaggcattaaagtattagcttacgaccgtatgattaacgatgcggatatcgatttttatatttctttcgataacgaaaaagtcggtgaactgcaggcaaaagccctggtcgatattgttccgcaaggtaattacttcctgatgggcggcagcccggtagataacaacgccaagctgttccgcgccggacaaatgaaagtgttaaaaccttacgttgattccggaaaaattaaagtcgttggtgaccaatgggttgatggctggttaccggaaaacgcattgaaaattatggaaaacgcgctaaccgccaataataacaaaattgatgctgtagttgccagtaacgatgccaccgcaggtggggcaattcaggcattaagcgcgcaaggtttaagtgggaaagtagcaatctccggccaggatgcggatctcgcaggtattaaacgtattgctgccggtacgcaaactatgacggtgtataaacctattacgttgttggcaaatactgccgcagaaattgccgttgagttgggcaatggtcaggaaccaaaagcagataccacactgaataatggcctgaaagatgtcccctcccgcctcctgacaccgatcgatgtgaataaaaacaacatcaaagatacggtaattaaagacggattccacaaagagagcgagctgtaagcgttacgccccagcgcggagcgggggcgtgatttctctccatgccgcgtgaatgaattggcttaggtggagtcgttatgccttatctacttgaaatgaagaacattaccaaaaccttcggcagtgtgaaggcgattgataacgtctgcttgcggttgaatgctggcgaaatcgtcagtctttgtggggaaaatgggtctggtaaaagtacgctgatgaaagtgctgtgtggtatttatccccatggctcctacgaaggcgaaattatttttgcgggagaagagattcaggcgagtcacatccgcgataccgaacgcaaaggtatcgccatcattcatcaggaattggccctggtgaaagaattgaccgtgctggaaaatatcttcctgggtaacgaaataacccacaatggcattatggattatgacctgatgacgctacgctgtcagaagctgctcgcacaggtcagtttatccattagtcctgatacccgcgttggcgatttagggcttgggcaacaacaactggttgaaattgccaaggcacttaataaacaggtgcgcttgttaattctcgatgaaccgacagccagtttaactgagcaggaaacgagcattttactggatattattcgcgatctacaacagcacggtatcgcctgtatttatattagccacaaactcaacgaagtcaaagcgatttccgatacgatttgcgttattcgcgacggacagcacattggtacgcgtgatgctgccggaatgagtgaagacgatattatcaccatgatggtcgggcgagagttaaccgcgctttaccctaatgaaccacataccaccggagatgaaatattacgtattgaacatctgacggcatggcatccggttaatcgtcatattaaacgagttaatgatgtcagcttttccctgaaacgtggcgaaatattgggtattgccggactcgttggtgccggacgtaccgagaccattcagtgcctgtttggtgtgtggcccggacaatgggaaggaaaaatttatattgatggcaaacaggtagatattcgtaactgtcagcaagccatcgcccaggggattgcgatggtccccgaagacagaaagcgcgacggcatcgttccggtaatggcggttggtaaaaatattaccctcgccgcactcaataaatttaccggtggcattagccagcttgatgacgcggcagagcaaaaatgtattctggaaagtatccagcaactcaaagttaaaacgagctcccccgaccttgctattggacgtttgagcggcggcaatcagcaaaaagcgatcctcgctcgctgtctgttacttaacccgcgcattctcattcttgatgaacccaccaggggtatcgatattggcgcgaaatacgagatctacaaattaattaaccaactcgtccagcagggtattgccgttattgtcatctcttccgaattacctgaagtgctcggccttagcgatcgtgtactggtgatgcatgaagggaaactaaaagccaacctgataaatcataacctgactcaggagcaggtgatggaagccgcattgaggagcgaacatcatgtcgaaaagcaatccgtctgaataacgcattgaggagcgaacatcatgagcaaaagcaatccgtctgaagtgaaattggccgtaccgacatccggtggcttctccgggctgaaaagtctgaatttgcaggtcttcgtgatgattgcagctatcatcgcaatcatgctgttctttacctggaccaccgatggtgcctacttaagcgcccgtaacgtctccaacctgttacgccagaccgcgattaccggcatcctcgcggtaggaatggtgttcgtcataatttctgctgaaatcgacctttccgtcggcagtatgatggggctgttaggtggcgtcgcggcgatttgtgacgtctggttaggctggcctttgccacttaccatcattgtgacgctggttctgggactgcttctcggtgcctggaacggatggtgggtcgcgtaccgtaaagtccctagttttattgtcaccctcgcgggcatgttggcatttcgcggcatactcattggcatcaccaacggcacgactgtatcccccaccagcgccgcgatgagtcaaattgggcaaagctatctccccgccagtaccggcttcatcattggcgcgcttggcttaatggcttttgttggttggcaatggcgcggaagaatgcgccgtcaggctttgggtttacagtctccggcctctaccgcagtagtcggtcgccaggctttaaccgctatcatcgtattaggcgcaatctggctgttgaatgattaccgtggcgttcccactcctgttctgctgctgacgttgctgttactcggcggaatgtttatggcaacgcggacggcatttggacgacgcatttatgccatcggcggcaatctggaagcagcacgtctctccgggattaacgttgaacgcaccaaacttgccgtgttcgcgattaacggattaatggtagccatcgccggattaatccttagttctcgacttggcgctggtagtccttctgcgggaaatatcgccgaactggacgcaattgcagcatgcgtgattggcggcaccagcctggctggcggtgtgggaagcgttgccggagcagtaatgggggcatttatcatggctagtctggataacggcatgagtatgatggatgtaccgaccttctggcagtatatcgttaaaggtgcgattctgttgctggcagtatggatggactccgcaaccaaacgccgttcttgattttgataaaaattttctcaaagccggttacgtattaccggttttgagtttttgcatgattcagcaggaaaagaaccatgtttactaaacgtcaccgcatcacattactgttcaatgccaataaagcctatgaccggcaggtagtagaaggcgtaggggaatatttacaggcgagtcaaagcgaatgggatattttcattgaagaagatttccgcgcccgcattgataaaatcaaggactggttaggagatggcgtcattgccgacttcgacgacaaacagatcgagcaagcgctggctgatgtcgacgtccccattgttggggttggcggcagctatcaccttgcagaaagttacccacccgttcattacattgccaccgataactatgcgctggttgaaagcgcatttttgcatttaaaagagaaaggcgttaaccgctttgctttttatggtcttccggaaagtagcggcaaacgttgggccactgagcgcgaatatgcatttcgtcagcttgtcgccgaagaaaagtatcgcggagtggtttatcaggggttagaaaccgcgccagagaactggcaacacgcgcaaaatcggctggcagactggctacaaacgctaccaccgcaaaccgggattattgccgttactgacgcccgagcgcggcatattctgcaagtatgtgaacatctacatattcccgtaccggaaaaattatgcgtgattggcatcgataacgaagaactgacccgctatctgagccgtgtcgccctttctagcgtcgctcagggcgcgcggcaaatgggctatcaggcggcaaaactgttgcatcgattattagataaagaagaaatgccgctacagcgaattttggtcccaccagttcgcgtcattgaacggcgcagtacagattatcgcagcctgaccgatcccgccgttattcaggccatgcattacattcgtaatcacgcctgtaaagggattaaagtggatcaggtactggatgcggtcgggatcagccgctccaatcttgagaagcgttttaaagaagaggtgggtgaaaccatccatgccatgattcatgccgagaagctggagaaagcgcgcagtctgctgattagtaccaccttgagcatcaatgagataagccaaatgtgcggttatccaagcctgcaatatttctactctgtttttaaaaaagcatatgacacgacgccaaaagagtatcgcgatgtaaatagcgaggtcatgttgtaacgatgatgagaattgtcggcgtcacatcaggtaacgctgcgtggttgtcggatgcggcgtgaacgccttatccgacctacccgccaggcatgataaaacgcaccaacaacgcttcaggctcgtagctcaactgcctgagacaaagtaaaaagccttatccgactgacaagtcggataaggctcaaggaaatgcaattacatatgcgccgcgattaaccgttggttatcctggtacattgcgaacaggtagttgttataactcttccctttggtgctgtagcccttcagcttgtgaatcatcgctgtggcagtcacttcctgatccgctttacgcagctgcgcacggcttttacggaagctagagtaagccgggtgcgtattcaggttagtgacataggcgctcacgctttctttgacagaactaaactgactgtaccctttcactttacctggcgcattggtacaacgtcctttcatgcatttcatgccgaacaggttgttgttgttgcgcgccagcttgctcgttccccaaccgctttctgctgcagccatcgtcgccaccatactggtggggataatgtctacgcgttcaagcaaggtattccacgggatttttcgcgtattaccggaccacttcaccttgtagcgtttggcgatgtctttcagacgcgcacgctcagcaggactccattggccctgatactgtttactaatgagccagttacgttccgcagtaatggccgcattttggctggtaatgtaaggcattacggtccggagaaacgcctttttccttggtgttccggaagggtattttcgcaaatcaggaagactactactctttgcactattgcgagaatactcttgtttactgcttacctgtttattactagctttagttaagtgggacttttgactcgctgttgttgtgtgcgtcttcgctaacacctcactgctaaacaccagagtgagtaacataagaatcatcgccccatatcgtcgtatgggagtcaaaatcatcaggtctcctggtcggatttaatcattccaacaccttatatttttcacaaatttgagagttgaatctcaaatcatatcaaaaatagctgtcaagagcaccccaaggaatagtccaaatctgaaactatgtcacgtgttaacgattcagattggcgctaaatcgcagaaaatgtgggggttatcgcaaaattcagccgttttttgcgcgagatcgctcacccttgcttctcatcctgtggacttaccgctcagggatgagttttgtttggcttatcgctggcaaactgtctgaaatcgcagcaataaggactcatccgccatgaaactcgccgcctgttttctgacactccttcctggcttcgccgttgccgccagctggacttctccggggtttcccgcctttagcgaacaggggacaggaacatttgtcagccacgcgcagttgcccaaaggtacgcgtccactaacgctaaattttgaccaacagtgctggcagcctgcggatgcgataaaactcaatcagatgctttccctgcaaccttgtagcaacacgccgcctcaatggcgattgttcagggacggcgaatatacgctgcaaatagacacccgctccggtacgccaacattgatgatttccatccagaacgccgccgaaccggtagcaagcctggtccgtgaatgcccgaaatgggatggattaccgctcacagtggatgtcagcgccactttcccggaaggagccgccgtacgggattattacagccagcaaattgcgatagtgaagaacggtcaaataatgttacaacccgctgccaccagcaacggtttactcctgctggaacgggcagaaactgacacatccgcccctttcgactggcataacgccacggtttactttgtgctgacagatcgtttcgaaaacggcgatcccagtaatgaccagagttacggacgtcataaagacggtatggcggaaattggcacttttcacggcggcgatttacgcggcctgaccaacaaactggattacctccagcagttgggcgttaatgctttatggataagcgccccatttgagcaaattcacggctgggtcggcggcggtacaaaaggcgatttcccgcattatgcctaccacggttattacacacaggactggacgaatcttgatgccaatatgggcaacgaagccgatctacggacgctggttgatagcgcacatcagcgcggtattcgtattctctttgatgtcgtgatgaaccacaccggctatgccacgctggcggatatgcaggagtatcagtttggcgcgttatatctttctggtgacgaagtgaaaaaaagcctgggtgaacgctggagcgactggaaacctgccgccgggcaaacctggcatagctttaacgattacattaatttcagcgacaaaacaggctgggataaatggtggggaaaaaactggatcagaacggatatcggcgattacgacaatcctggattcgacgatctcactatgagcctagcctttttgccggatatcaaaaccgaaagtactaccgcttctggtctgccggtgttctataaaaacaaaatggatacccacgccaaagccattgacggctatacgccgcgcgattacttaacccactggttaagtcagtgggtccgcgactatgggattgatggttttcgggtcgataccgccaaacatgttgagttgcccgcctggcagcaactgaaaaccgaagccagcgccgcgcttcgcgaatggaaaaaagctaaccccgacaaagcattagatgacaaacctttctggatgaccggtgaagcctggggccacggcgtgatgcaaagtgactactatcgccacggcttcgatgcgatgatcaatttcgattatcaggagcaggcggcgaaagcagtcgactgtctggcgcagatggatacgacctggcagcaaatggcggagaaattgcagggtttcaacgtgttgagctacctcagcagccatgatacccgcctgttccgtgaagggggcgacaaagcagcagagttattactattagcgccaggcgcggtacaaatcttttatggtgatgaatccagccgtccgttcggtcctacaggttctgatccgctgcaaggtacacgtagcgatatgaactggcaggatgttagcggtaaatctgccgccagcgtcgcgcactggcagaaaatcagccagttccgcgcccgccatcccgcaattggcgcgggcaaacaaacgacacttttgctgaagcagggctacggctttgttcgtgagcatggcgacgataaagtgctggtcgtctgggcagggcaacagtaacttttccggcttcccgttcgtcagtacctcgggaagccgccaaccaggataaaatgtcagccctaatcagcgttgcaggataaagcaccgctcactcttcaacagaccgatttgcaccccagcaaatgtagcgttattgttaccttccttgctacagagttcgacagatatcccgctatgacattctccctttttggtgacaaatttacccgccactccggcattacgctgttgatggaagatctgaacgacggtttacgcacgcctggcgcgattatgctcggcggcggtaatccggcgcagatcccggaaatgcaggactacttccagacgctactgaccgacatgctggaaagtggcaaagcgactgatgcactgtgtaactacgacggtccacaggggaaaacggagctactcacactgcttgccggaatgctgcgcgagaagttgggttgggatatcgaaccacagaatattgcactaacaaacggcagccagagcgcgtttttctacttatttaacctgtttgccggacgccgtgccgatggtcgggtcaaaaaagtgctgttcccgcttgcaccggaatacattggctatgctgacgccggactggaagaagatctgtttgtctctgcgcgtccgaatattgaactgctgccggaaggccagtttaaataccacgtcgattttgagcatctgcatattggcgaagaaaccgggatgatttgcgtctcccggccgacgaatccaacaggcaatgtgattactgacgaagagttgctgaagcttgacgcgctggcgaatcaacacggcattccgctggtgattgataacgcttatggcgtcccgttcccgggtatcatcttcagtgaagcgcgcccgctatggaatccgaatatcgtgctgtgcatgagtctttccaagctgggtctacctggctcccgctgcggcattatcatcgccaatgaaaaaatcatcaccgccatcaccaatatgaacggcattatcagcctggcacctggcggtattggtccggcgatgatgtgtgaaatgattaagcgtaacgatctgctgcgcctgtctgaaacagtcatcaaaccgttttactaccagcgtgttcaggaaactatcgccatcattcgccgctatttaccggaaaatcgctgcctgattcataaaccggaaggagccattttcctctggctatggtttaaggatttgcccattacgaccaagcagctctatcagcgcctgaaagcacgcggcgtgctgatggtgccggggcacaacttcttcccagggctggataaaccgtggccgcatacgcatcaatgtatgcgcatgaactacgtaccagagccggagaaaattgaggcgggggtgaagattctggcggaagagatagaaagagcctgggctgaaagtcactaaaaattgcctgatgcgctacgcttatcaggcctacatgatttctgcaatatattgaatttggaagaatttgtaggccggataaggcgtttacgccgcatctggcataaacaaagcgcactgttccggcgttgagaaacgccggaaaacgtttcaaacaggctgctgccgtagccgatgccgctgcactttctcgacatccatgcactgcaacgcctttgtcgggcaggcttcaacacaggccggtcccgtctcccgatgccagcacagatcgcacttaatcgccctcgcctttttgcggctagaaacgacctccatcgcaccaaacgggcaagccagcatacagcttttacagccaatgcaacgtgtttgttcaacgaaaatatgcccatgttcgcggcttatcgcgtcaacagggcagacattcgcgcacggtgcatcttcacactgatgacaggctactgccgtggtccagcagtggtctttaatgacacgaatacgggaaataaactcgtctggactcaacgcagcgcaatcctgattctcatgatggctcactgcgcaagccacttcacaggtacggcaaccgatacatttcgtcgcatccgcaataataaaccggttcatgatcactcctttgcactaaaacagcagagtgccagagagcgcgtccctactgctttgatccaacgaaggaaatgttaaagttttggcacttgtccaaagcgttatgtgatcgcgcccaggtcatccctgacagtaaatcccagttcattagaaatagcctgcgcggtttcacgcagtggtttcaggagatttttctctcccacctgtttcagacgacttgtgctaaggctaatgctcacggcgtacggcacccgcccatgaatatcaaacaccggaacagcaatacaggagacgccgagttcgttttcttctctgtccatcgccgctccgctttcacgaatgtgcgccagttcgtcgaacatcgcgggcagctcggtaatggtattgcgggttaacggctggatctcatgctgatggctttcccagtaactcttcacgtagtccgggtgaccaaacgccatgtagatcttgcccattgcggaacagtagagcggcatatgctggccaatataggcacgggttcgcagcatcccggttgtgggttccagcttataaatcaaaatagcgtgatcgtcttcgcggctggagaagttaatggtttcaccagtggcgatgttcagtgcctcaagatgcggagcggcgatatgaatgatattcaggctagacagcgccttctgcccgacggcaataaatttggtggtcaggcgataactccctgcggcaggcgcggtggtcacatagccgcaggactgtaatccctgcaataagcgatggacggtactcttatttaaaccagccagctcgctaagatgcgccaacggacaaccgtttggatagttgctcaaaatctcaatcagcatcaacccgcgaaacagactctggcttccggctggacgctctttttcctgcgccatctcgttctctttttttcccatcacttctttccccattttgtcgcgtcctgatggtagcgcaaagtgtgccgtagttcacgatctcgacagataatttataaccaattgatttttatgtcttttgaaattcatcaatcagattgccttgttaaaaagtgatcgatatatttgaaatcaagtttcgcatattgaaattttaagccaaaaaagcgatcaaaaaaacaaggaagcctgggatgaaagtgacatttgagcagttaaaagcagcctttaatcgggtcttaattagtcgcggcgttgacagcgaaacggctgacgcctgtgcagagatgttcgcccgcaccaccgaatccggcgtttattctcacggcgttaatcgtttccctcgtttcattcaacaactggaaaacggcgatatcattcctgatgcccaacccaaacgtataaccagcctcggcgcaattgaacagtgggacgcccagcgtagcatcggtaacctgacagcgaaaaagatgatggatcgcgccattgaactggctgccgatcacggtattggtctggtggcactacgtaatgccaaccactggatgcgcggcggcagctacggctggcaggcggcggaaaaaggctatattggcatttgctggaccaactccatcgccgtaatgccgccgtggggcgcaaaagagtgtcgcataggcactaacccgctgatcgtcgccattccttccacgccgatcaccatggtcgatatgagcatgagcatgttctcttacggcatgttagaagttaaccgtctggcaggtcgtcagctcccggtcgatggtggctttgatgatgagggcaatttgaccaaagaacctggcgttatcgagaagaatcgccgcattttgccgatgggctactggaaaggttctggcatgagcattgtgctggatatgatcgctactctcctttccgacggcgcatccgttgccgaagtcacccaggacaacagcgacgaatacggcattagtcaaatttttattgccattgaagtggacaagcttatcgacggtcccacccgcgatgccaagctgcaacgcatcatggattacgttactagtgccgagcgtgctgacgaaaatcaggccattcgcttacccggccatgaatttactaccctgctggccgaaaaccgccgtaacggcatcactgttgatgacagcgtgtgggccaaaatccaggcgttatgaggagataagtcatgatttttggacatatcgcgcagcccaatccgtgccgtttgcccgccgccattgaaaaggcgctcgattttctgcgcgctaccgatttcaacgccctggagccgggcgttgtcgaaatcgacggcaaaaatatttatacgcaaattatcgatttaaccacacgcgaagcggtggtaaaccgtccggaagtgcatcgtcggtatatcgatattcagtttctggcgtggggcgaagagaaaatcggcattgctattgatacgggaaataataaagtcagcgaaagtctattagagcagcgcaatattattttttatcacgacagtgaacatgaaagttttatagaaatgataccgggcagctacgcaattttctttccgcaggatgttcaccgaccaggttgtattatgcaaacagcctctgagatacgaaaaattgtggttaaagtcgcattaacggcgctgaattaatcgaataatcgtctacgccagaacgcctgggtaatgttattgctctaactatattaataattcaggttgctgcacatgcgacttgaattatgacagacatagcctcaaggaatagctatgaaaaaaatactcgaagcaatactggcgattaatctcgccgtactttcctgtattgtatttataaacattattttaagatatggttttcagacaagcattttatctgttgatgaattgagtcgttatttatttgtctggttaacgtttattggcgcgattgtagcttttatggataacgcccacgttcaggtcacctttctggtggagaaactctcccccgcatggcagcgacgagtcgctctggttacccattccttaatcttatttatttgtggcgcactggcctggggcgcaacgctaaaaacaattcaggactggagcgattatagtccgatcctcggtttacccatcggcctgatgtatgccgcttgtctgcccaccagcctcgttatcgcattctttgaactgcgtcatttatatcaactcatcacgcgtagcaattctctaacgagcccaccgcaaggagcttaatcatggctgtgctgatttttctgggctgtctgttgggtggtattgctatcggtttgcctattgcctgggcactgttgttgtgcggggcggcgttaatgttctggctggacatgtttgatgtccagatcatggcacaaacgctggtgaacggagccgatagcttctccctgctggcgattccgttctttgtgctggcgggtgaaatcatgaatgcgggcggcttgagtaaacgcattgttgacctgccgatgaaactggtggggcataaaccaggcgggctgggctacgtcggcgtgctggcagctatgattatggcgagcctttctggttctgccgttgcggataccgccgccgttgccgctctactggtgccgatgatgcgcagcgccaactatccggtcaaccgggcggcggggctgattgcctctggcggcattatcgcgccaattattcccccttccattccgtttattatcttcggcgtttccagcggattatccatcagtaagctgtttatggcgggcattgcccctggcatgatgatgggcgcaacgctgatgcttacctggtggtggcaggccagtcgccttaatttaccccgccagcaaaaagcaacgatgcaggaaatctggcactcttttgtctccggtatctgggcgctgtttcttccagtcatcattattggcgggtttcgctccggcctgtttacccctaccgaagccggggccgttgctgctttctatgcgctgtttgtcgccacagttatttaccgtgaaatgaccttcgccacactttggcatgtactcattggcgcggcgaaaaccaccagtgtggttatgtttctggtggccagcgcacaagtttccgcctggctgattaccattgctgaactgccgatgatggtttctgatttactgcaaccgttggtcgatagtccgcgtctgctgtttatcgtcattatggtggctatcctgattgtcggcatggtcatggatttaacgccgacggtattaattcttaccccggtattaatgcctttagttaaagaggcaggaatcgatccgatttatttcggtgtcatgtttatcattaactgcagtatcggcttaattacaccgcctatcggtaatgtacttaacgttattagtggggtggcaaaactcaaattcgatgatgcagtcagaggcgttttcccttacgtcctggttttatatagtttattagtcgtatttgtttttattcccgatctcatcatcctccctttgaaatggattaattaaaaggaaaatattatgaaattacgctctgtaacctacgcattattcattgctggcctggctgcattcagcacatcttctctggcggcacaatctttacgtttcggttatgaaacaagtcaaaccgacagccaacatattgcggcgaaaaaattcaatgatttattgcaggagagaaccaaaggcgagctgaaattaaaactgttcccggacagcactctcggtaacgcgcaggcgatgatcagcggcgtacgtggcggcaccatcgatatggaaatgtccggcagcaataactttgccgggttaagtccagtgatgaacttgcttgatgtccctttcctgttccgcgataccgctcacgcgcataaaacgctcgacggcaaagtcggtgatgatctgaaagccagtcttgaaggtaaaggactgaaagtactggcctactgggaaaacggctggcgcgatgtcaccaacagccgcgcaccggttaaaacccccgccgacctgaaagggctgaaaatccgcaccaacaatagcccgatgaatatcgccgcattcaaagtctttggcgctaacccgatcccgatgccgtttgccgaagtctataccgggctggaaacccgcactatcgacgctcaggaacacccgatcaacgtcgtctggagtgcaaaatttttcgaagtgcagaagttcctttctctgacgcaccacgcctattccccgcttctggtggtgatcaacaaagcgaagtttgatggcttaagtccggagttccagcaggcgctagttagttctgcacaagaagcgggtaactatcagcgcaaactggttgctgaagatcagcaaaaaatcatcgacggcatgaaagaagcgggcgtggaagtcatcaccgatctcgaccgcaaagcctttagcgacgcactggggaatcaggttcgcgacatgtttgttaaagatgtgccgcagggagctgatctgctgaaagccgtggatgaggtgcaataaaccatgacgcaatactggctggggttagattgtggcggtagctggctgaaagccgggctgtatgaccgcgaaggccgggaggcaggcgtgcagcgcctgccgctgtgcgcattaagcccgcagccaggctgggcagagcgcgatatggcagaactgtggcaatgctgcatggctgtcattcgcgccctgcttactcattctggtgttagcggggaacaaattgtcggtatcggcatctccgcacagggaaagggcttgtttttgctggataaaaacgacaaaccgctcgggaatgctattttgtccagcgaccgccgggcgatggaaatcgttcgtcgctggcaggaagatggcatcccggaaaaactctacccgctgacccgacaaaccttgtggaccgggcatccggtgagcctgttacgctggctgaaagagcacgaaccagaacgctacgcgcaaattggctgcgtgatgatgacgcacgactacctgcgctggtgtttaactggcgtcaaaggctgtgaagagagcaatatttccgagtccaacctctacaacatgagtcttggggaatatgacccgtgcctcaccgactggctggggatcgctgaaatcaatcacgccctgccgcctgttgtcggatctgccgaaatctgcggggagatcaccgctcagacagccgccctgaccggtctgaaagcgggtacgcccgttgttggcggcctgtttgatgtggtttccaccgcactctgcgccgggatcgaagacgaatttaccctcaatgcggtgatggggacctgggcggtgaccagcggcataacccgcggtttacgtgacggtgaagcgcatccgtatgtctatggtcgctacgttaacgatggtgaatttatcgttcacgaagccagccctacctcttccggcaacctcgaatggtttaccgcacagtggggagaaatcagctttgatgagatcaatcaggccgttgccagcttgccgaaggctgggggcgatctctttttcctgccgttcctgtacggcagcaacgccggactcgagatgaccagtggtttctacgggatgcaggccattcacacccgcgcgcacctgttgcaggccatctatgaaggggtggtgttcagccatatgacccacctcaaccgaatgcgcgaacgttttactgatgttcacaccctacgcgtcactggcggcccggcgcactccgatgtctggatgcaaatgctggcggacgtcagcggtctgcgtatcgagctgccgcaggtggaagaaaccggctgctttggtgcggcccttgccgcccgcgtcggcaccggggtttatcacaacttcagcgaagcccaacgtgacttgcgacacccggtgcgcaccctgctgccagatatgaccgcccatcagctttaccaaaaaaaatatcaacgttatcagcatctcattgccgcacttcagggctttcacgcccgcattaaggagcacacattatgagccgaccacttctgcaactggccctcgaccacagtagtcttgaagccgcgcagcgcgacgtgacgctgttaaaagacagcgtcgatatcgtcgaagcgggcaccattctctgtttaaacgaagggcttggcgcggtgaaagccttgcgcgaacagtgcccggacaaaatcatcgttgctgactggaaggtcgccgacgctggtgaaacgctcgcgcaacaggcgtttggcgcaggcgctaactggatgaccatcatctgcgccgcgccgctcgcgacggtagaaaaaggccacgcaatggcacaacgctgcgggggtgaaattcagatagagctgttcggtaactggacgctggacgacgcccgcgactggcatcgtattggcgtgcggcaggccatttatcatcgcggtcgtgatgcacaggccagcgggcaacagtggggcgaagccgatctggcacgcatgaaggcgcttagtgatatcggccttgagctttccattactggcgggattacccctgctgacctgccgctgtttaaagatatccgcgtgaaagcgtttattgccgggcgggcactggcaggcgcggcaaatccggcgcaagtggctggcgatttccatgcgcaaatcgacgctatctggggaggtgcgcgtgcgtaatcatcagttagggatttatgaaaaagcgctggcgaaagatctctcctggccggagcggctggtgctggcaaaaagctgcggttttgattttgtcgaaatgagcgtggatgaaaccgacgaacggctcagtcgtcttgactggagcgccgcacaaaggactagcctggttgccgcgatgatcgaaacaggtgttgggatcccgagcatgtgcctgtccgcacatcgtcgctttccctttggtagccgtgacgaggcagtgcgcgaacgggcgcgggaaatcatgagtaaagcgattcgcctggcgcgcgatctcggcattcgcaccatccagctggcaggttatgacgtctattacgaagaccacgacgaaggcacccggcaacgttttgctgaagggctggcgtgggcagtcgaacaggcggcggcaagtcaagtaatgctggcggtggagattatggataccgcgtttatgaactccatcagcaaatggaaaaaatgggacgagatgctcgccagtccgtggttcaccgtctacccggacgtcggcaacctcagcgcctggggcaatgatgttcccgccgaactgaaactgggcattgaccgtatcgccgcgatccacctgaaagacacccagccagtcaccgggcaaagtcccggacagttccgcgacgtgccgtttggcgaaggctgcgtcgatttcgttggcatcttcaaaacgctgcataaactgaactatcgcggttctttcctgattgagatgtggaccgaaaaagccaaagagccggtgctggagattattcaggcgcggcgttggattgaagcgcgtatgcaggaggctggatttatatgttaacgtaaatgcaggaggctggatttatatgttagagcaactgaaagccgacgtgctggcggcgaatctggcgcttcccgctcaccatctggtgacgttcacctggggcaatgtcagcgcggtagacgaaacgcggcaatggatggtaatcaaaccttccggcgtcgagtacgacgtgatgaccgccgacgatatggtggtggttgagatagccagcggtaaggtggtggaaggcagcaaaaaaccctcttccgatacaccaacgcatctggcgctctaccgtcgctatgccgaaattggcggtattgtgcatacccacagccgccacgccaccatctggagtcaggccgggctggatctccccgcctggggcaccacccacgccgattatttttacggtgccatcccctgcacgcgacagatgaccgcagaggagattaacggcgaatatgaatatcagaccggcgaagtgatcattgaaaccttcgaagaacgtggcaggagtccggcacaaatcccggcggtgctggtgcattctcacggcccgttcgcatggggtaaaaacgccgccgatgccgtgcataacgccgtagtactcgaagaatgcgcctatatgggtctattcagccgccagcttgcgccgcagctccctgcgatgcaaaacgaactgctggataagcactacctgcgtaagcatggggccaatgcctattacgggcagtaatccctcacgccggggcttcatcgccccggcactacgaattgatatgttccttgctgtaacgccgcttccacgctgctggcgttaaaccagtatgtttctgaaaaatctgccggaaatagccaacgtcattaaaccgtattgcatggagcaggccgacaacgtcgagtcactgcataacctgttgctgcccgccgatgcgccatttacgacatttgaaggcaagggattgttcagccataagatcctgattcagacgccaggttcccggtatgaacagagcaatccagagcaacaacctttgtggcattacgacggagcaccagccgcaccgacatccaccggtgaattaaaaacgccagctcaccccggtgacaaaggtaaaactctcattacgatcaatcatcgggctgtcggtaatctcttccggcagctcgctgtatcctgcgctcgccatcaatacgacgtgctctcctatcgggtattttgccgtcaggctgacatagggcacccaggcatcctgcgcggaataacttgccagaccgctacgacgggactcactctcactaatgccatagtaatagtcactgaaattctcgtcataatagagaacgcccagcgcaggtgtcaggctcagacgacctatccgcattttgtggaatacgcttagctcccccacccagccgttgctgttatccagaacgtccgcagctgcagaggctttcacggttccccaacgctcgtggtgataccaggcaacccccgccatagccgtactatcacgcttatcaagctgttgcatggcataatcgtcattatcggtagggtcaaattccagcggcatccaggatgcggtcaggctaagttcatttttttcactttggctcagaataaaacctaacgtggtctgacgaacataaaaagtatcaccttcataactaatcagcggaattgccttcgtattttcattataaccgcgataagggctttcattataagccgcaccagcaccaatggataattcagaagcagttgcgcttgccataaaaggcaacgcaaataacgccacaatattgcgattaattaacatgtccggtattccattttaaaataagataaaaaagagtcggcataataatgcttacaatttctccggtgcaagattcatatttatatagtaatatataaaattatatataattgggctgttgcgatgacaaaattacaacttaagtaccgggagttaaaaattatcagcgtaatcgctgccagtgaaaatatcagccatgccgcgactgtacttggcatcgcacaggccaacgtcagcaaatatcttgctgattttgaaagtaaagtgggtttaaaagtccttgaccgaaccacccggcagctgatgctcacaccttttggcaccgcgctgttaccgtacatcaacgacatgctggacagaaacgagcaacttaataattttattgcagattataagcatgagaaacgtggtcgggtcaccatctacgccccaaccggcataattacctatttatccaaacatgtaatcgataaaattaaagatatcggtgatatcaccttaagcctaaaaacctgcaatcttgagcgtaatgccttttatgaaggcgtcgaatttcctgatgattgtgatgttttaatcagctacgctccaccaaaagatgaaagcctggttgccagttttattacccaatatgccgtaaccgcttatgccagccagcgctatcttgagaaacatcccattagccgtcctgacgaactcgaacatcactcctgtattttgatcgacagcatgatgatcgacgacgcgaatatctggcgcttcaacgtcgccgggagtaaagaggtgcgggattatcgcgtgaagggaaattacgtttgcgacaacacgcaatctgcgctggagctggcacgaaatcacctggggattgtgtttgcgccagacaaaagtgtgcagagcgacctgcaagacggcacgctggtgccctgctttcagcaaccctatgaatggtggctggatctggtggctatcttccgtaaacgggaataccagccctggcgggtccagtatgtgctggatgaaatgctgcgtgaaattcgccaccagcttgctcagagccagcaactgcggcctgaacaagcggcggaaagcgaagattaatgatcgagataaaggtaatgcacccagctggtcatgcgtaatagcactttgcgcatcacgctgacatggctgaaatgatcagagtaaaccgccacctgggcgtaaataccgtctggtaaagcgctcaaatcagtgtgctcatccagttcaatggtcgcgataacgccatcactacccggcgctgtgtttaacgtctgtaaggtgccggtgctctgataagctccgccgggaacggctggactaatggctgccagcttaccgctgaataccttacctggcagagcattaaacaccacttccgcatcgtcgccaggagccagtcgcagcaaggagttctgacggaactgcgccacgatttgtcgtttctgatcgggtataaacaccatcaccggacgtagcggcaggctcgcggcataggtacccggacgaatcagtacctgggtcacataaccatcgctcggcgcacgcactatcgtctgctcaaggttatattttgcttccgcgagctgtgctttcaggctggcgatttgagaatgttcacccaacaccaggctatccagctggctctggatctgtttttgttccgccgcgctactcttcacggaggcttcctgcgccagataattttgccgcgccacatcgatatcgcgttcactaaacgggtttactttcgcctggctgccacgtgcgtaacgctgatactctttagcgaatttatcccgcgtggcctttgcctgctgagtattcgccgccatctcatctaactctgcgcccaacgcccgctgtttatgttctgcggtaacgatatccgccatcagccgatccacccgcgcctgataacgcgtcgggtccagtcgaaatagcacctcaccttttttaatcagcgtatttttcttatccgtcacttcaatcaccacaccagtcacctgtgggacaacaggaatagaaataaccgctttttgcgctttaaaggtatacggatggttatagttcattaacagaattagaccgctgacaataaatattccacccagggccgctgtgggaatggtccatttatttacgggaattttgaagatcttaaacattgcccatgcaaaagccacataggtcaaaataatcagtaaatccataagtattactcggcagaagaggatttgatgtcggcgagctgtttctccagcccggcaatgcgctgttgcagttgcataacggaactatcatggctttgcattccccatccccgctccgggcggtaaagcgtggcccaaatccacaaaaacggccagataacatgtaacgtaaaaagactcacccaaccagcaacatgaatggcgtcggcatgaggatgattacgttttttggcaatcaggtagggaatatcatgtaaaataatgatcccatagaagatcaccagaaatacaaaaataagcactcccagtgcaaaatagtccaggaacatatttccctcaaagaatataaaaaagaacaattaacgcatattatgaaatgccatgatgcagtgcaatttccttatttatataacgacatattgttttttatatactttcttaaatgtgctgtctggtttttcaacaggacgaggtttatcatattgaaatagtggaactattggccaaactaatgaataactccagtaaaacatccacagtacagattaagcgtattaaaccttcaattatctaccgtttattgctgattggcctcggatcaccaatggtgatttacggcctggttcgcccgctcaccatcgaaacgcgagattaaactcctgacaaaacacgccccagaaacgtacttctgttggcgtagtctgggttattgcgcacgtaggtttaaaacgtaaattgtaacaacgtgcgctttgtttatgccggatgcggcgtgtacgccttatccggcctacggtcaggttcccgtaggcatgataagacgcgtaagcgtcgcatcaggcaatgaatacccaatgcgaccagcttcttatatcagaacagccccaacggtttatcgctgtagctcaccagcaggcacttggtttgctggtaatgctccagcatcatcttgtgggtttcgcgaccgataccactttgtttgtagccaccaaacgccgcatgtgccgggtaagcgtgataacagttggtccacacgcgcccagcctgtatgccgcgccccatcttataggccagattaccgttgcggctccagacgcccgcgcccaggccatattgcgtatcgttcgccagctccagcgcttcttccatcgttttgaaggtggtcaccgccagcaccgggccaaaaatctcctcctggaacacccgcatattgttctgaccaaacagaatcgtcggttcgaggtagtagccgtctttcagttcaccttccagcagcttgcgccgcccgcctgtgagcacgtcagcgccctcttttttaccgatatcaatgtagttgaggatggtttccagttgcccgtgagaaacctgcgcgcccatttgcgtcacgctgtcgagcgggttaccgctacgaatgctttcgacacggcggatggcgcgttccataaagcgttcgtagatagattcctgcactaaagcacgactcggacaggtgcaaacttcgccctggttaaaggcaaacagtgcaaagccttccagcgctttatcgaaaaaggcatcttcttcatccatcacatcagcaaagaagatatttgggctcttaccgcccaactccagcgtcaccggaataatgttttgcgttgcgtattgcataatttgttggcccacttccgtactgccggtaaacgccactttggcgatgcgtttgctggtcgccagatattcgccaattaccccacctgcgccattgaccacgttcaccacgcccggcggcagtaaatcaccgacaatttccattagcagcagtacagaaagcggggtaagacgtgcgggtttcagcaccacacagttgcccgccgccagcgcgggagccattttccagctcgccatcagcagcgggaagttccacgggataatctgccccaccacgcctaacggttcatggaaatgataggccacggtttcgctatcaacttcactgatcccaccttcctgcgcccgaatacagctggcgaaatagcggaaatggtcaatcgccagcggtacatccgcagcactggtttcgcgaatgggtttgccgttatcccaggtttcagctgtcgctaacagctcgaggttttgttccattcgatcggcaatcttaaacagaatcgccgcacgatcctgcacgctggtgtgcgcccatttatctttcactttgtgcgcagcatccagcgccagatcgatgtctcgtttgccgctagacgccacttcgcacagcagctgcccggtcaccggcgtcagattctggtaatactcgccgtcggcaggggctacccattcgccgccaataaagttgtcatagcgggcttttaacttgagggggaaaccatactcgccgggcttaatctgtgcactagggggattattggtcatgatcgtctccttgcggtgtgaggtataacaagggtagacgtgactggcgaaatcttcgccagtcggtaacagctttacgacagctatcacgaatttacgggcaagggttacagagatagttgaaaaagcggctaacaatttgccagccgttgtggaaatgatgattacatcgctgcgcgataaatcgccacaatttcttcgtgagttgcctggatcgggttagtaaagccacaggcatctttcagggcattagtcgccaataccgcgaaatcttcttctttcacgttcaggtcgcgtaggcctgccgggatatccactttcttcgccagttcacggatggcgttaatgcaggcttcagcaccttccgcgtcgtttttacctgtcacgttcacgcccattgcagcggcacagtcacgcagacgtgcagcggcgactttgctgttgaatacctgaacgtgcggcagcaaaacggcgttacatacaccgtgtggcaggttgtagaaaccgcccagctggtgcgccatcgcatgaacataacccagagaagcattattgaacgccataccggcgaggaactgggcataagccattgcttcacgcgctttcgcattactgccatcttcaacggctaacggcaggttttcggcaatcatggtcacggctttcagtgcacaagcgtcagtgatcggcgtggcggcaatagaaacatatgcttcgatagcgtgcgttaaggcatccatacccgttgcggcggtcagactcttcggcataccaatcatcagagaggagtcattgacagaaagcagcggagtgacatgtttatcaacaatcgccattttgatatgacgcgcttcgtcagtgatgatgcagaaacgggtcatttcagaggccgtacccgccgtggtattgatggcgatcatcggcagctgcggttttgcagagcggtcaacgccttcgtaatcgcgaatatcgccgccattggctgccaccagcgcaataccttttgcgcagtcgtgtggagaaccaccgcctaaggagatcacgctatcgcaattattctctttaagtaatttcaaacctgcggcgacgttttccgtggtggggttaggttgggtgccatcataaataacgctaaaaatattgcgttcttccagtgctttttgcacatcgcccgccatacctaatttcgttaacatattgtcagtgacaattaaggtacgggtaaatccataatctgccatcatattcattgcatcagtcaaactatcagcgccgatgacattcacagaaggaataaagaacgtactagctgccataacacactcctgaaagtgtaaaaaagggcgggcagcttactgaggattttcattcgaaaatatgatcagtattattgattatcaaaattaatctaataaaaagcacattgtattcattaaacaatgtgctttttttaaattcataagaattttgtattaatttattttaaaacttaattaatcatttccttatttttccggaaataataatgcgtcgcgcaataaatgatcatttccacgacgacgcgtaaagccaatgcggtcaaaatattccagaatctgaattgccagctttcggcctacgcctaagcgatcgcggaaatccgccgcgcaggtactaccacactcctgatcgagatcgcggatcatattggcaaactcgacaatccgatcgttacggtaataacgatctttaacgatcgcggtaattattccttgctgcgccgcctggcgtagagtcaggcgcattgcctgctcgtcggttcccgtctcttttgccaggtcacgcacccaccacggttcgtcaccaaacagtggctctgctttttgccagatggcctgctgctcttcgctgaagcccgctttgtgatctggcagatgcagccagccgtgatggctgtggatgtcgccgctttcgcgcatcttttcaatcagcaacagtaccagcgcttcatcttccattggcaacgccatacgtcgcagacgttcgcgcccagggccaggttcatcgcgatgttgctcatgataagtcgctaatgtgtcgagaattttccgctgccagcgggcggcaaccggcgcattcaacaagctataaccagcctgaatataaccaggctgttgcagcaattcgcgcatcccttcgccgttgagctggcgcgcccaggcgaaatccgcaaggttaaccgcgccgcgttccagatgaacagataacgcatcggcatcgctctgcgcccgtgcaagagacgccagccattgcagatattccggcttacgtttaccgcgacgcggcgggttaagcatcacgacgcgcgctccggccagcgtgttgcgggcagagatatcgcgcaataccaggcggtcgttatctgccagccataacggggtgtcgaagaccagttcagcaaggttatcttccagcagactaacgcgtcccgtgacgtggctggcggcgtggtgaatatgcagcggctgccactgggtcagcggtgtatgggtttgaagctcgacaatcacccgtgtgaacggctctggcggcacatcggcaagcagccagtcgccacggttaatctgctctttttccgcatcacccgcgatgttaagcgcgatacgctgcccggcattggcggtttctgttggctggttttgcgcatgcagcgcacgtacacgcatcggtttatttacaccagtcagccagagactatcgcctaccttcacttccccgcttaacgccgtaccggtgacgaccagcccggcaccttttacggtaaatgcgcggtcaatcgcgaggcggaaactatgttggctggcgtgctcgcgttccggcaactgaagcagatgctcgcgcagggcatccattccccgaccttcggttgctgcggtgataaacagttttgcctcagcaaaaccgtattcccgcagaacctcctttacctggcgttcaacctcatcaacacgcgcttcgtccacgcgatcggctttggtcagcgccactgtcagcatcgggttaccggtcagctgcaaaatcgccagatgctcacgggtctgtgccatcacgccgtcatcgcacgccaccaccaacagcgcgtgatcgataccaccaacgcccgccagcatgttggaaagaaacttttcatgaccgggaacgtcgataaaaccaggcacgcgaccatccggctgcggccagtaggcatagccgagatcgatggtcatgccgcgctttttttcttccggcagacggtcagcatttacgccagtaatcgcctgcaataaggttgttttgccgtggtcaacgtgtccggcagtcgcaataatcatttcaacaacatctccaaaaaccgttgctcatcttcaaggcagcgtaaatccagccacaatcgtccgtcataaatacgaccaatcaccggcactggcaattcacgccagcgggcggctaaactctcaaggtggctaccgcgtccatcatggggtgtaaacgttaatgccgcgctcggcaggcgatcaaccggcaggctaccactgccaatctggctaagacatggcataacctgtaccgcaaactccgcgccgtaatgtgcggcaaggggggcctgtaaacgttgtgcctggatttgaatgacctctgcgctgcgggtaagcaggcgcagggtcggtaatttttcactcagagcttcagggtgtaaataaagacgcaacgtggcttccagcgccgcgagggtcattttatccgcgcgtaatgcacgcttcagcgggtggctttgcaggcgggcgatcatctcttttttaccaacaataattcctgcctgcggcccgcctaacaacttgtcgccggagaaactcaccagactgacgcccgccgcaatcaactcctgcggcattggctctttcggcaaaccgtactggctaagatcgaccaggctgccactgcctaaatcagtcactacgggaacatccagctctttgccgagcgccaccagttccgcttcatctatcgctttggtgaacccctgaatgctgtagttactggtatgtactttcatcaacagtgcggtattttcattcaccgcctgacgataatcattcgcgtgcgtgcggttggtggtccctacttcgtgtagggtgcagcctgcctgacgcataacatcgggaatacgaaacgcgccgccaatctccaccagttcgccgcgagataccaccacctcttttccgctggcagtggccgccaacatcaataacaccgccgccgcattgttattgacgatacaggcatcttccgcccccgtaatacggcacagcagctgcgccagcgcccgatcgcgatgtccgcgtccggcgtcgtccagatcatactcgagggtcactgggctacgcatagcctgcgcaacggcttccaccgcggcttccgcctgtaaagctcgcccaaggttggtatgcagcacggttcccgtcaggttgatcaccggacgcagcgcgctctgcgcttctttcgtcaaccgggcatcgacttcttgcgcccagttttcacaccacgcaggcagcgtctggctgccacgaatcacttctcgcgcttcgtcgagcatctgacgcaacaattccaccacgcgggtgtgaccataagtatcacgcaaagaaaggaaggagctatcgcgcaataagcgatcaatagccggaagttgactatagagggaacgcgtttcggttgtcataggaaacctggctgatcaaggccctctcacacggagaagggcgtttaacataaccacggattgtaacgtgagatgggtcaggaggacatatcgcgcatcaagcctttggcggttcggtgcgagcaaaactttcgcggctaaacaggttttcgaccagtttgactaagtgtgggcggtcgacacaccaacctggcgcaacgcggcggaaattgagatatccgacggcacaggcaatggcgatagtcgccagattgaccgtatcggttttgagtgtgccatcgaccagatatccttccagcacatccagactgcggttgattttctcccgctggcgtaacaattcatcttcagactgctgcgccgctggacgcgcctgttcacgcacgcttaccagcccggcatccataatgccatccgccagtgcctcaattttgcgcacccgcaagctctccagcggatcgcgcggcaacatcgccggagcgacattcattaattcaatatattcagcgatgatcgggctatcaaaccagcattcgccctcttcggtcaccagcaccggcacttttcctaacgggttaaattgcgccacgccgttgtccgcgttatagggcagttcattaataaattcgaaagttatgcccttttctaacaacagaatagaaagtttgcgtacaaacgggctggtgtagctaccgacgagtttcatgccgagtcctttgtgcgaggaaaaatatcagtatggctcaatgatccaaataaagataatgcatccagctggtcattcttagcagcactttccgcatcacgctaacatggctgaaatggtcggagtaaaccgccacctgggcgtagatgccgtcgggtaaggcatcgatatcatcgttagggtccagttcaatggttcccagcacaccgtccgtgccgggcacgaccgttaaactttgcaataccccctgcgcctgataagaaccgcctggcacgacaggtaaaatactagtcagtttgccgtgaaacacctgcccaggtagcgcgttaaacaccacttccgcatcatcgccaggtttcagacgtaacaggctgttttgccgaaattgggcgacaatttgccgtttttgctcggggatgaagaccatcaccggacgcagcggcaaggcagctgcgtatgtacctgggcggatcagtacctgagtaacgtagccattgctcggcgcgcgaatgacagtctgctcaaggttatattttgcttcagtaagttgcgctcttaagctcacaatctggctttgctcgccgttaaccatactgtcgagctggctctggatctgcgcctgctccgccacgctgcctttcaccagcgcatcctgcgcgaggaaattttgccgcgcatcgtcgatgtcacgttcgctgaacggattcaccgccgcctggctgcctttcaagtaacgttgataatttttaaacagacggtcgcgctccgcactaacctgggtggtgttggcctgcgcttcagtgagctgcgcacgcagcgtctttatattatgcgtcgccgtcatcaggtcagcctgaagtctgtcaactcgcgcctggtaacgaaccgggtcgagcttaaaaagcacctcgcccttttgaataagctgattattcttgtcagtgacttcagtaacaattcccgtcacctgtggcgtgatagggatcgctatcactgccttttgcgcggtaaaagtgtaagggtggttgtagttcatcaacaaaatcaaaccactcaccagaaacacgcctcccagcgccgccgtcgccagcgtccactgatttaccggaatgcggaagattttaaagaccgcccacgccagcgccacgtaagttaaaacaatcaatagatccataattagatctccgggaacgtggaatagtcagtctttttctcggcggcgagttgatgctccaaccgggaaattcggtcagaaagtgcggcgatttccgggtcagtcgctttctcctggctcgcaacatgactctgcataccccagccacgctccggttgatagagcgtcgcccagatccacagaaacggccagataacatgcagagtaaacaggctcacccagcccgccgtatgaatagcgtcggcatggggatggttgcgctttttggcaatcagataagggatgtcatgtatcgcgatgattccataaaaaatcaccagaaagacgaagatcagcactcccaacgcgaaatagtttagaaacatatctgcctcggattcacgtttatcagtgttgtttttgggctggcagccagaagggagtcaggctgatattttgacaataatccgggttcgcgattctcgccataacaccaaagaataatttttagaggtgatgagttgcttagttacataacgattgtatgacgaaggcataacatgctgtagatcacatcaggtgaacgccgtaagaaaatatcttgtgattcagatcacaaagattcaacaaaccatcaaaacaaaaatgtgacactactcacatttaaatgccatttttagcgaaaatcgccgccttgttgcttttttacacaagcgttttgtgatgaacgtcacgtcaattacctctctaccccctatatttatgtgattgatatcacacaaaaggccgtcgactggacagttaaccgattcagtgccagatttcgcagtatctacaaggtccggctacctctgccgccacattaacaaaaaacctcgggcttccagcctgcgcgacagcaaacataagaaggggtgtttttatgagttccgatattaagatcaaagtgcaaagctttggtcgtttcctcagcaacatggtgatgccaaatatcggcgcgtttatcgcgtggggtatcatcaccgcgttatttattccaacagggtggttaccgaacgagacgctggcgaagctggtcgggccgatgatcacttatctcctgccgctgctgatcggttataccggtggtaagctggtaggcggcgaacgtggcggcgtagtcggtgccatcaccaccatgggcgttatcgtcggcgcagacatgccgatgttcctcggttctatgattgcaggtccgctgggcggctggtgcattaagcacttcgaccgctgggtagacggtaagatcaaatccggttttgagatgctggtgaataacttctccgcaggcatcatcgggatgatcctcgctattctggcattcctcggcattggcccgattgttgaagccctgtccaaaatgctggctgcgggcgttaacttcatggttgtccatgacatgctgccgctggcgtctatctttgttgaaccggcgaaaatcctgttcctcaacaacgccattaaccacggtatcttcagcccgctgggtattcagcagtcccatgaactgggtaaaagtatcttcttcctgattgaagctaacccaggtccaggtatgggcgtgctgctggcgtacatgttctttggtcgtggtagcgctaaacagtctgcgggcggtgcggcaatcatccacttcctggggggtatccacgaaatctacttcccgtatgtgctgatgaatccgcgtctgatcctcgcagtcatcctcggcggtatgactggcgtgttcacgctgactatcctgggcggtggtctggtttctccggcatctccgggttctatccttgctgtactggcgatgacaccaaaaggtgcttacttcgctaacatcgcgggtgtgtgtgcggcgatggctgtctccttcgttgtctctgctattttgctgaaaaccagcaaagtgaaagaagaagatgatattgaagcagcaactcgtcgtatgcaggacatgaaagctgagtctaaaggcgcatctccgctgtctgctggcgatgtgactaacgacctgagccacgtacgtaaaatcatcgttgcctgtgacgccggtatgggttccagtgcgatgggcgcaggcgttctgcgtaagaaaattcaggatgcaggtctgagccagatttctgttactaacagcgcgatcaacaacctgccgccagatgtggacctcgtcatcactcaccgtgacctgaccgaacgcgctatgcgccaggttccgcaggcacagcatattagcctgaccaacttcctcgacagcggcctgtacaccagcctgaccgaacgtctggttgctgcccaacgccacacggcaaacgaagagaaagtaaaagacagcctgaaagacagctttgacgattccagtgctaacctgttcaagctaggcgcggagaacatcttcctcggtcgcaaagcggcaaccaaagaagaagcgattcgttttgctggcgagcagctggtgaaaggcggttacgttgagccggaatacgttcaggcgatgctggatcgtgaaaaactgaccccgacttatctgggtgagtctatcgcggtgccacacggtacggttgaagcgaaagatcgcgtactgaaaacgggcgtcgtgttctgccagtacccggaaggcgtgcgcttcggtgaagaagaagatgacattgcccgtctggtgattggtattgctgcccgtaacaacgagcacattcaggttatcaccagcctgaccaatgcactggatgatgagtccgtcatcgagcgtctggcacacaccaccagcgtggatgaagtgctggaactgctggcaggtcgtaagtaatccaatcccaccctctccacatggagaaggtggggttaattgcctgatgcgctacgcttatcaggcctacaggatgcatcacaatttgttgaatttgcacgttcttgtaggccggataaggcgcttacgccgcatccggcgctgcccctctcctcacggagagggtttgggtgagggaaaagcctcaccccagccctctcgggtaaaaacattgatgaaggttaatactatgaaagcattacattttggcgcaggtaatatcggtcgtggctttatcggtaaactgctggcagacgcgggtatccaactgacgtttgccgatgtcaatcaggtggtacttgatgccctgaatgcccgtcatagctatcaggtacatgtggttggtgaaaccgagcaggtagataccgtttccggcgtcaatgctgtcagcagcattggtgatgatgtcgttgatctgattgctcaggttgatttagtcactaccgccgttggcccggttgtgctggaacgtattgctccggcaatcgccaaagggcaggtgaaacgtaaagaacaaggtaatgaatccccgctgaacatcatcgcctgtgaaaacatggtacgcggtaccacgcagctgaaaggccatgtgatgaacgccctgccggaagacgccaaagcgtgggtagaagaacacgttggctttgtcgattccgccgttgaccgcatcgtaccgcctagcgctagcgcaactaacgatccgctggaagtgacggtagaaaccttcagcgaatggattgtcgataaaacgcagttcaaaggcgcactgccgaacatcccaggcatggagttaaccgacaacctgatggcatttgtcgaacgtaaactcttcaccctgaacacgggtcatgctataaccgcgtacctcggaaaactggccggtcatcagaccattcgtgacgcgattctcgacgagaaaatccgcgcggtggtaaaaggtgcgatggaagaaagtggtgcagtattgatcaagcgctacggctttgacgctgacaagcatgcggcgtacatccagaaaattctcggccgttttgagaacccgtatctgaaagatgatgtagagcgcgtaggccgtcagccactgcgtaaactgagtgctggtgaccgtctgatcaagccactgctcggtacgctggaatatggtctgccacataaaaacctgattgaaggtattgccgctgcaatgcacttccgcagtgaagatgatccgcaggctcaggaactggcagcactgatcgctgacaaaggtccgcaggcggcgctggcacagatttccggtcttgatgccaacagcgaggttgtatccgaggcggtaaccgcttataaagcaatgcaataatggtggaccaggcgcaggacaccctgcgcccgaataacagattgagtgatatgcaggcaacaatggaacaaacccaggcctttgaaaaccgtgtgcttgagcgtctgaatgctggcaaaaccgtgcgaagctttctgatcaccgccgtcgagctcctgaccgaggcggtaaatcttctggtgcttcaggtattccgcaaagacgattacgcggtgaagtatgctgtagaaccgttactcgacggcgatggtccgctgggcgatctttctgtgcgtttaaaactcatttacgggttgggcgtcattaaccgccaggaatacgaagatgcggaactgctgatggcattgcgtgaagagctaaatcacgacggcaacgagtacgcctttaccgacgacgaaatccttggaccctttggtgaactgcactgcgtggcggcgttaccaccgccgccacagtttgaaccagcagactccagtttgtatgcaatgcaaattcagcgctatcaacaggctgtgcgaagtacaatggtccttagtctgactgagctgatttccaaaatcagcttaaaaaaagcctttcaaaagtaagcaacgtctgcttactgcccctctacctgcttcggccgataaagccgacgataatactccagacgttgtagatataacggcacgctttcatcgggtattccggacggaatcgcgttacggggaggaagttttttcagatactcccggaacgcctggctacttgccatgaaatctacggctttatcgataagaagcggaacgttttcacctaatttgcccatgatgatatctccgtattaccccgcgccgggaatgcgcggccgccaattttagtttaggttcccggtaaagatgacattaaggaaaacgtgctgaatcctcaataatcatccgctgctgtttattatcttttttctatagatttcttaattaatcaacgaattgcgcagtttttgagcatgttaatgattacgttacagaactattacaatgtcattagttgtgaacaaagcacctggtcgcgcatactaggggctataaatttatctttatcagaagccatcacatgaaagaagtcgaaaaaaacgaaatcaaacgcctcagcgatcgcctggacgccatccgccaccagcaggccgatcttagcctggttgaagccgcagacaaatatgccgagctggaaaaagagaaagccacgctggaagcagaaattgctcgcctgcgtgaagttcatagccaaaaactgagtaaagaagcacagaagctgatgaagatgccattccagcgcgcaattaccaaaaaagagcaggctgatatgggcaagctgaagaaaagtgttcgcggactggtcgttgtgcacccaatgaccgcactgggccgcgaaatgggcctgcaggagatgactgggtttagtaagaccgcgttttaagaacacagtatctacagggtgattctgcacattcctataggccgagtaaggtgttcacgccgcatccggcaagataaggcgctctggatcaacaacctaagggcaattctctgatgaggattgcccttttctttaccagacatctccccccacaagaattggccctaccaattcttcgcttatctgacctctggttcacaatttcccaattaaaactcacatcaatgttgccaatacataacatttagttaaccattcattgtcattatccctacacaacacaattggcagtgccacttttacacaacgtgtgacaaggagatgagcaacagactcattacacgatgtgcgtggactccaggagacctgcaatgaatctctggcaacaaaactacgatcccgccgggaatatctggctttccagtctgatagcaagccttcccatcctgtttttcttctttgcgctgattaagctcaaactgaaaggatacgtcgccgccagctggacggtggcaatcgcccttgccgtggctttgctgttctataaaatgccggtcgctaacgcgctggccagcgtggtttatggtttcttctacgggttgtggcccatcgcgtggatcattattgcagcggtgttcgtctataagatcagcgtgaaaaccgggcagtttgacatcattcgcagctctattcttagcataacccctgaccagcgtctgcaaatgctgatcgtcggtttctgtttcggcgcgttccttgaaggagccgcaggctttggcgcaccggtagcaattaccgccgcattgctggtcggcctgggttttaaaccgctgtacgccgccgggctgtgcctgattgttaacaccgcgccagtggcatttggtgcgatgggcattccaatcctggttgccggacaggtaacaggtatcgacagctttgagattggtcagatggtggggcggcagctaccgtttatgaccattatcgtgctgttctggatcatggcgattatggacggctggcgcggtatcaaagagacgtggcctgcggtcgtggttgcgggcggcagctttgccatcgctcagtaccttagctctaacttcattgggccggagctgccggacattatctctagcctggtaagtctgctctgcctgacgctgttcctcaaacgctggcagccagtgcgtgtattccgttttggtgatttgggggcgagtcaggttgatatgacgctggcccacaccggttacactgcgggtcaggtgttacgtgcctggacaccgttcctgttcctgacagctaccgtaacactgtggagtatcccgccgtttaaagccctgttcgcaagcggtggcgcgctgtatgagtgggtgatcaatattccggtgccgtacctcgataaactggttgcccgtatgccgccagtggtcagcgaggctacagcctatgccgccgtgtttaagtttgactggttctctgccaccggcaccgccattctgtttgctgcactgctcagcattgtctggctgaagatgaaaccgtctgacgctatcagcaccttcggcagcacgctgaaagaactggctctgcccatctactccatcggtatggtgctggcattcgcctttattagcaactattccggactgagtagtacactggcgctggcactggcgcacaccggtcatgcattcaccttcttcagcccgttcctcggctggctgggggtattcctgaccgggagcgataccagttctaacgccctgttcgccgcgctgcaagccaccgcagcacaacaaattggcgtctctgatctgttgctggttgccgccaataccaccggtggcgtcaccggtaagatgatctccccgcaatctatcgctatcgcctgtgcggcggtaggcctggtgggcaaagagtctgatttgttccgctttactgtcaaacacagcctgatcttcacctgtatagtgggcgtgatcaccacgcttcaggcttatgtcttaacgtggatgattccttaatgattgttttacccagacgcctgagtgacgaggttgccgatcgtgtgcgggcgctgattgatgaaaaaaacctggaagcgggcatgaagttgcccgctgagcgccaactggcgatgcaactcggcgtaagtcgtaatagtctgcgcgaggcgctggcaaaactggtgagtgaaggcgtgctgctcagtcgacgcggcggcgggacgtttattcgctggcgtcatgacacatggagcgagcaaaacatcgtccagccgctaaaaacactgatggccgatgatccggattacagtttcgatattctggaagcccgctacgccattgaagccagcaccgcatggcatgcggcaatgcgcgccacacctggcgacaaagaaaagattcagctttgctttgaagcaacgctaagtgaagacccggatatcgccagtcaagcggacgttcgttttcatctggcgattgccgaagccagtcataacatcgtgctgctgcaaaccatgcgcggtttcttcgatgtcctgcaatccagtgtgaagcatagccgtcagcggatgtatctggtgccaccggtttttagtcaactgaccgaacaacatcaggctgtcattgacgccatttttgccggtgatgctgacggggcgcgtaaagcaatgatggcgcaccttagttttgttcacaccaccatgaaacgattcgatgaagatcaggctcgccacgcacggattacccgcctgcccggtgagcataatgagcatagcagggagaaaaacgcatgattatttccgcagccagcgattatcgcgccgcagcgcaacgcattctgccgccgttcctgttccactatatggatggtggtgcatattctgaatacacgctgcgccgcaacgtggaagatttgagtgaagtggcgctgcgccagcgtattctgaaaaacatgtccgacttaagcctggaaacgacgctgtttaatgagaaattgagcatgccggtggcactggctccggtgggtttgtgtggcatgtatgcgcgtcgtggcgaagttcaggcagccaaagcggcggacgcgcatggtattccgtttactctcagcacggtttccgtttgcccgattgaagaagtcgcgccagccatcaagcgcccaatgtggttccagctttatgtactgcgcgatcgcggctttatgcgtaacgcgctggagcgagcaaaagcagcgggttgtagcacgctggttttcaccgtggatatgccgacaccgggcgcacgctaccgtgatgcgcatagtggtatgagcggcccgaacgcggcaatgcgccgctacttgcaagcggtgacacatccgcaatgggcgtgggatgtgggcctgaacggtcgtccacatgatttaggtaatatcagtgcttatctcggcaaaccgaccggactggaagattacatcggctggctggggaataacttcgatccgtccatcagttggaaagaccttgaatggatccgcgatttctgggatggcccgatggtgatcaaagggatcctcgatccggaagatgcgcgcgatgcagtacgttttggtgctgatggaattgtggtttctaaccacggtggccgccagctggacggtgtactctcttccgcccgtgcactgcctgctattgcagatgcggtgaaaggtgatatagccattctggcggatagcggaattcgtaacgggcttgatgtcgtgcgtatgattgcgctcggtgccgacaccgtactgctgggtcgtgctttcttgtatgcgctggcaacagcgggccaggcgggtgtagctaacctgctaaatctgatcgaaaaagagatgaaagtggcgatgacgctgactggcgcgaaaagcatcagcgaaattacgcaagatagcctggtgcaggggctgggtaaagagttgcctgcggcactggctcccatggcgaaagggaatgcggcataatcgtttgcgccccctcaccctaaccctctccctcagggagaggggaccgttcggcgctgtatgtactccctcactctgaaacgacaccgcactctttttttctccctcgcccctccggggagagggccggggtgaggggaaaaggccgcactgctcaccaattttctgctatcctgcccccgcactaagggggcagtatgctaaacatcgtactttacgaaccagaaattccgccaaatactggcaacatcatccgtctttgcgctaataccggctttcgtctgcatatcatcgaaccgatgggatttgcctgggacgataagcgcctgcgccgcgcggggctggactatcacgagtttaccgccgttacgcgtcatcatgactatcgcgcgttcctcgaagcagaaaatccccagcgcctgttcgccctcaccacgaaaggtacacctgctcacagcgccgtaagctatcaggatggcgattatctgatgttcggcccggaaacacgcggcctgccagcgagcattcttgatgccctgcccgctgaacaaaaaattcgcattccgatggtgccggacagccgcagcatgaatctgtccaatgcggtgagcgtagtggtgtatgaagcctggcggcagttggggtatccgggagcggtattgagagattaattactgtaggccggatagatgattacatcgcatccggcacgatcacaggacattagatcccatccccatactcaaatgtatggttaataccgttgaaatgctggtccatatccatacttggcttatcgctgtctggtttaccgacaatacgagccggaacgccagcggcggtggtatgcggcggcaccggttgcagcaccacggaacctgcgccaatcttcgcgccgcgcccaacttcaatattgccgaggattttcgcgcccgcgccaatcatcacaccttcacgaattttcgggtgacggtcaccaccagatttacccgtaccgccaagcgtcacagattgcagaatgcttacgtcgttttcaatcaccgccgtttcaccaacgacgatgcctgtcgcgtggtcaagcatgataccgcgaccaatttttgctgccgggtgaatatcgacctggaacgtcacagaaacctggttttgcagaaagattgccagtgcgcgacgcccctgattccacaaccagtgaccgatgcgataggcctgcaaggcatgaaaacccttcaggtataacaacggggtactgtatttatcgactgccgggtcgcgggtacgcaccgcctgaatatcacaggccgcagaggcgatcatttccgggtcagcggcgtaggcttcttccaccacttcacggatagcaatagcaggcataattgggctactcagcttgttcgccagcatgtagctcagtgcactgccaaggttttcgtgcttgagtagcgtcgcgtggtaaaaactggccagcattggctcacagtccgccagcgttctggcttcggctttaatattgttccagacaatttccagttcttcacagctcattgcttactccacacgatgagataatgaccggcccgttctgcgcgggccgggtcatagcggtaacaaaggttccctggggttagtggctgctgcgctcgtccttgcgtgcacgacctagtaaagtcaatgctgcctcgcgcgcgttttttccgcaatataatacttgataaatttcctcggttattggcatttcaacgccgaagcgatgcgccagttcgcggacttctttcgtattgcggtagccttccaccacctgaccaatcttctcctgcgcgctttgtacatccatgccctgaccgagcatcatgccaaaacggcggttacggctctggttgtcggtacaggtaagcaccagatcgccaagccccgccatgcccataaaggtggcagggtcggcacccagcgccgcaccaagacggctcatttcagccagcccacgggtgatcagcgccgtacgcgcattcgcaccaaaaccgataccgtcggacatccccgcaccaatggcaataacgtttttcaccgcgccgccaagctgcacgccaatgaaatccggattgctgtaaacgcggaaacttttgccgcagtgcagcagctgctggagatcatcggcaaaggtctgatcggtgctggccaggctaatagctgtcggtaaacctgccgccagttctttcgcaaacgttgggccagagataaccgccagcggaatttgatcgcctaaggcctcacgcgccacgtcctgtaacagacgtccggtttccgcttccagccctttggtcgcccacaccagacgcgcatcaggacgcatcagtggtttaatctggcgcagcacttcaccaaagacatggctgggtacgacgacgagaatattacggctggctgccagcgcagtggcgagatcgctttcaagatggagcgtatcgggaaaaggcacatcggggagaaacgcggcgttacagcggtcgcgttcaagcgttgcgatatgttcagggtcatggccccagaggacaacctcgtggccatttcttgccagggtgatggcaagagcggtgccgtagctgccggcaccgatcacagtcatactagcattacgttggttcatcaggcatcctgatgttcttcagtaccttcgccagcctgctgctgcaaatagttcatgaacagcgcatcgaagttaaccggcgcaaggttcagttgcgggaatgtaccgcgggataccatgctggtgatgcactcacgagcatacgggaacagaatgttcgggcagtatgctcccaggcaatgcgccatctgggtgccttcgatacccgcgatggagaaaataccgccctgctgaacttcacacaggaacgcggtttcttcgcccaaagaggccgttacggtaacacgcagtaccacttcgtatacgtcatctgccagttgggaagatgccgtatccagatcaagtttaacttctggttgccaatctttctggaaaacgtgcggcgcgttcggcgcttcgaaagagatatccttggtataaatacgttggatctggaaagtcatttcagtgttgttttgttcactcatgtgtagaaaacccttaagtgttgtccttaaatactgcgcaatgtaatgccaacgttcacacgttatttcagcaggggatccagtccaccacgtgcatccaatgcatacaagtcatcacagccgccaatgtgctgtgcgtcaataaaaatctggggaaccgtggtgcgaccgctgcgtttgatcatctcttcacgcttggcggcgttgccatcgatcggcagctcctggaaactcacgcccttgctgctcagcagtgcttttgcacgatggcaatacgggcaggtttctttggtatagatttcaacattggccataaattagctcctgtttttttaccctgaaatttcatgttgcagggcggcagcaaaatggagtgtccccagaagcttataacaataagtcgctgggggcctaattgcagctaacggcctgcatcatgaaagacgacaggtaaattatttgccgcgcaccaaaggcaagttttcgccagcccagccagcgacgccttctttcagcacgaatacttgcgcaaaaccagctttcgtcagtgcgtttgcaggctcctggcactgcatgccagaaccgtctaccacgataaccggtttgtctttgtgcttctcaagctcaccaacattgttggctttgatttcgctcggcaacagattaatagaacctgcgatatggcctttacggaagtcatcacgctgacgtaaatccacaaccacagcgtcttctttgttgatcagacgcgtagcttcaccacgagtaatcaccttcactttgctggtcaggctcttaaacgtagtcacaagaaccgccaccagtaacgcgatccaggcgatactcagtatgggatgacggccaacaaattgcataatttcttgcatggggggtaacaactcccgacgtagtgattaaaaaaaccaggaaaggagtatacctgcgcggtgcggcaaatacagccagcgcgttaactggaatgcaattttgcggggcgcgacgaaaaaaaagcgtaaatctggcatcggcttgccgcgagcggtcgtatattttgatcttcagaggctattttatcgattcagctgtagtaaaattacgcaaattttgactcttgagtatgaggttgtcgcaatgttggtttctaaaaaacctatggtactggtgattctggatggctatggctatcgcgaagaacagcaggataacgccatttttagtgctaaaaccccggtaatggatgcactgtgggccaatcgtccgcataccctaatcgacgcttccggtctggaagtcggtctgcctgaccgtcagatgggtaactccgaagtaggccacgttaacctgggtgccggccgcatcgtgtatcaggacctgactcgtctggacgttgaaatcaaagatcgcgctttctttgctaatccggtgctgactggcgcggtagataaagcgaaaaacgcaggcaaagcggtacacattatgggtctgctctccgcaggcggcgtacacagccacgaagatcacatcatggcgatggtagaactggcagctgaacgcggcgcagaaaaaatctacctgcacgcattccttgacggtcgcgacactccgccgcgcagtgctgaatccagcctgaaaaaattcgaagaaaaatttgccgcgctgggcaaaggccgcgtagcgtccatcattggtcgttactacgcgatggaccgcgataaccgttgggatcgcgtagaaaaagcttatgacctgctgactctggcgcagggcgagttccaggccgataccgccgttgctggtttgcaggctgcttatgctcgcgacgaaaatgatgaattcgtgaaagcgaccgttatccgtgctgaaggtcagccagacgcggcaatggaagacggcgatgcactgattttcatgaacttccgtgctgaccgcgcgcgtgaaatcactcgtgctttcgtgaacgctgatttcgatggcttcgcgcgtaagaaagtggttaacgtcgatttcgtgatgctgaccgaatacgccgctgacatcaaaactgcggttgcttacccacccgcttccctggttaacaccttcggcgagtggatggcgaaaaacgacaaaactcagttgcgtatttccgaaaccgaaaaatatgcccacgttactttcttcttcaacggtggcgtagaagagagcttcaaaggcgaagatcgcattctgatcaacagtccgaaagtggctacctacgatctgcaaccggaaatgagctccgcagagctgaccgaaaaactggttgcggccatcaagagcggcaaatacgacaccatcatctgtaactatccgaacggcgacatggtaggtcacaccggggtgatggaagcggcggttaaagcggttgaagcgctggatcactgcgtggaagaagtcgcgaaagcggttgagtccgtgggtggacaactgctgatcaccgctgaccacggtaacgctgagcagatgcgcgatccggcaacgggtcaggcacacacggcacacaccaacctgccagttccgctgatttacgttggtgataagaacgtgaaagcggttgaaggcggcaaactttctgacatcgcgccgaccatgttgagcctgatgggtatggaaatcccgcaagagatgactggtaagccgctgttcatcgtggaataatccctccccatgaggggaaaggcgattaataccatgacacgggccgtgaaaccgcgcaggtttgcaatcaggcccatcatctacgccagcgttcttagcgctggcgtattgttgtgcgccttttccgcccacgcggatgagcgtgaccaactcaaatctattcaggctgacatcgccgcaaaagagcgcgcggtacgccaaaagcaacaacaacgcgcaagcctgctcgcacaattgaaaaagcaggaagaagcgatctctgaagccacccgtaagctgcgcgaaacgcaaaacacgctcaatcaactcaataaacagattgatgagatgaacgcgagcattgccaaactggagcagcaaaaagccgcccaggagcgcagcctcgccgcacaactggatgccgcattccgtcagggcgagcataccggtattcagctgattctcagcggtgaagaaagccagcgtggacagcgtttacaggcttatttcggctatctcaaccaggcgcgacaagaaaccattgcccagttgaagcaaacgcgtgaagaagtcgccatgcagcgtgctgaactggaagagaaacagagcgagcaacaaacgctgttatatgagcagcgcgcccaacaggcgaaactgactcaggcgctgaacgagcgtaaaaagacgctggcagggctggagtcttccatccagcaaggtcagcaacagttgagcgagctgcgcgccaacgaatcccgtctgcgtaacagcattgcccgtgcggaagccgcggcgaaagcgcgtgcagaacgagaagcacgtgaggcccaggcggttcgcgaccgccagaaagaagcgacgcgcaaaggcaccacctacaaaccgaccgaaagcgaaaaaagcctgatgtcccgtaccggtggtctgggcgcgccgcgtggtcaggcattctggccggttcgcgggccgacgctgcatcgctatggcgaacagctacagggtgaattacgctggaaaggtatggttatcggtgcttctgaaggtactgaagttaaagcgattgccgacggtcgggtgattctggctgactggctgcaaggctacggtctggtggtggtggttgagcatggtaaaggcgacatgagtctttacggctataatcagagcgcactggtgagcgttggtagccaggttcgcgcgggccagccgattgcactggtgggcagcagtggcggtcagggtcggcctagtctctatttcgaaattcgccgccagggtcaggcggtcaatccacagccgtggttgggaagataagttttgtttccatttcgtcgtaacgttcttgcatttgccgctctgttggcgctctcctcccccgtacttgctggcaaacttgccatcgtcattgatgattttgggtatcgcccgcacaacgaaaaccaggtgctggcgatgccttccgctatctccgtcgctgtattacccgatagtccgcacgccagagagatggcgaccaaagcgcataacagcgggcacgaagtgttgattcatctcccgatggcaccgttgagtaaacagccgctggagaaaaatacgctacgcccggagatgagcagcgacgaaattgagcgcattattcgtagtgcggtcaataacgtgccctatgccgtggggatcaacaaccacatgggcagcaagatgacctctaacctgtttggtatgcagaaagtgatgcaggcgctggagcgttacaatctttacttcctcgacagcgtaaccatcggtaatacccaggcgatgcgcgccgcgcaaggcactggcgtgaaggtgatcaaacggaaggtattcctcgacgatagccaaaatgaagcggacatccgtgtgcaatttaatcgcgcaattgacctggcgcgtcgcaacggtagcaccattgccattgggcatcctcaccctgcaacggtacgcgtgttgcaacagatggtttataacctgccgccagacattacgctggtgaaagccagcagcttgctgaatgaaccgcaggttgatacttctacaccgccgaaaaacgctgtgcctgatgcaccgcgtaatccgttccgtggcgtgaagctgtgcaaaccgaagaaaccgatagaacctgtttatgctaatcgcttctttgaagtattaagcgaaagcatcagccagagcacgctgatcgtttacttccagcatcagtggcaaggctggggcaaacagcccgaagcggcgaagtttaacgctagcgcaaattaattagcgcaaattaaaggcgctacgcgtaatgcgatggtggctccgcgttttgtcgcgccattgccataagcggaaagaccacagtaacgcctggtaaccgaccttcacgctgcgcacattggtaatcaggcgcttatacataccggaagtaaatatctcggcaatcatccgttggcgggtaagaatatccggctctttgcgcaccgcatggcaaacacgcaatgcctcgtaagttatttgctgatgaaattccggataaatcataattttgtcggcataatttcgatttaatttctccagcaggcgggtaatcttaatatagtgacgttgataattaaggtttttattcccttgtctatgcaaccgactcacactcgtattatgcagataatatttatataaactttgctcggtatatcgcgcacgcagcgcgttaaacatgaattctgttgtccagacaatatcctgatgatgtaatccggcaataaatttaatgttatttttaacaataacatcacggcgataaacccccatccagacaacgtgagtccaacggcggctagaaagccccatccgcagccagtccgggccggttaatacgccggtactgcgaaggcgatcggtggggatggattgccaggtttctcccgtttcacgaaaacaccagtcagcgttgcactgcgccacgtcgaggtcgtcctctaacgccatggtcatcagcgtttcgtacatggtgggatagacttcatcgtcagcatcgacaaaagcgacatatttgcccgttgccacttcaatcccacgattacgcgccacgcttgcgccagcattcgcctgatgcaacaaacgaacgtgcggatagttttctgcgtaatactttgctatttcaacagaattatccgtactaccatcgttaataataatgatttccagagcagtccaggtttgcgtaattaaagattccatacaagtgcggaaatcatcgcccgcattatataacggaataataacactaagtttattggtgctgttcatcataaattaccgacgacctctgaagttatcctgacgttttacaggctttgtattaagaaactattaagcctgtgagatattatttttacaggtgagagagtcacttcagggtagagagataatgagagcagctatataagagatcagcacaattacgaactctttattacactgacaggattttacatatttaacagattatcctcagataaaagggctggaataccagcccttgttcgtgttaatcccagctcagaataactttcccggactggccgctacgcatagcgtcaaagcccttctggaaatcatcgatagagaaacgatgggtaatgatcgggctaagatcgaggccagactgaatcagcgccgccatcttgtaccaggtttcaaacatctcacgaccgtaaatacctttaatgaacaagcctttaaagatcactttggtccagtcgatagacatatcagacggcggaatacccagcatcgcaatacggccgccgtgattcatggtgtcaagcatggtacgaaacgctggcggcgcaccggacatttccagaccgacatcaaaaccttcggtcatgcctaactccgccatcacgtcattgagattttctttggcgacgttaaccgcacgggtgatacccattttacgcgccagctcaaggcggtattcgttaacatcagtgatcaccacattgcgtgcaccaacgtgtttcgccaccgccgctgccataataccaatcgggcctgcaccagaaaccagcacatcttcgcccaccagatcaaagctcagcgcggtatgcacggcgttaccgaagggatcaaaaattgcggctaagtcatcggaaatattgtcggggattttgaaggcgttgaatgccgggatcaccagatattcggcaaagcagcccgggcgattaacaccaacgcctatcgtgttgcggcacaaatgggtacgaccaccacgacagttgcggcaatgaccacaggtgatatggccttcgccagaaacgcgatcgccgatcttgaagcctttcacttcctgaccaatacctaccacttcaccgacatattcatggcccacgaccatcggcaccgggatggttttttggctccactcatcccagttatagatgtgaacgtcagtcccgcagatggctgttttacggattttaatcagcagatcgttatgcccgagttccggtacaggaacgtcggtcatccagatgccctcttccgctttcagtttggataacgctttcatctcacatcctcaggcgataacgcccagttgtttaccaatacgcgtaaatgcttctactgcacgcgtaatttgctcaggggtatgcgccgcagacatctgggtacgaatacgcgcctgacctttcggaacgaccggatagaagaaaccggtaacgtaaatgccctctttttgcagctcacgggcaaatttctgcgccactaccgcatcaccaagcatgaccggaataatggcgtgatcggctcccgccagggtaaagcccgccgcgctcatttgctcacggaactgacgcgcgttcgcccacagacggtcacgcagttcgctgcccgcttcgaccatctccagtactttgatggacgcggcaacaatggccggtgccaggctgttggagaacaggtacggacgagaacgctggcgcagccactcaaccacttctttgcgcgccgcggtataaccaccagaagccccgcccagcgctttaccaagcgtaccggtgataatatcgacccggcccatcacatcgcagtattcatgggaaccacgaccattttcaccgacaaaaccgaccgcgtgggagtcgtctaccatcaccagggcatcatatttatctgccagatcgcaaacgcccttcaggttggcaatcacgccgtccatactgaacacaccatcggtggcgatcagcacatgacgcgcaccggcttcacgcgcttctttcagacgtgcttccagctcctgcatatcgttgttggcatagcgatagcgtttagctttgcacagacgcacaccatcaataatagacgcgtggttcagtgcgtcggagataatggcgtcttccgcacccagaagcgtttcaaacaggccaccgttagcatcaaagcaggaagagtagagaatcgcatcttccatccccaggaaggccgccagtttttgttcaagctctttatggctgtcctgagtgccgcaaataaaacgcacgctagccatgccgaaaccgtgagaatccattcccgcctttgccgccgcaatcagatcaggatgattcgccagcccgagatagttgttggcacaaaagttaatgacgtggcttccatcagccacagtgatatctgcttgctgcgcagacgtaataatgcgctcttctttaaacaacccttccgcccgtgcggtttccagatcgttggttaactgctgataaaattctccacgcattgcgattctccagacagggcaaattccagcacatattacccaaacttataggtcgcgacgagataacgcgttaacacttctgcaaaattcaggataaataacgtgtaacttgatgtctctcaacacctacagatagtagaaaaactgtacagttttggctgggcataatgatgattgattttactgcattgatataaaaagaaaaaatgatgccaaagcatcatttttcctatctcagttggtatcaaaacgctacccactaatggagggaaacttattttctactaaggaaaattctcagcgcctgcatttttgcccctaaagtgttactcctgaagcagcgaaacaaatcgaaccattttcctctccccagatagtttaggttgaagagatcggggcgtttgtaatagcacatgacaaaaatgccctggtcatcgtccacaatgttattatttagtgttattttttgactttccagaactaatttatagaattctttccatttatgctgactaccaacaattgcgcccccaataatatatacatgattgccaatcatgaaatcaaaaacctgttgttgagatgtgacagtaagccctttttttatagtgaaaagatgcatcttactttcatcaaatgggaaatcccaaattttcaatcctcgagttacatttggcttatggcaatagccaaaatctatccacgcaacaagaggcgttttcactaagcccatgttgatagctttatttacaaaataggccttaaggttacataccaaaacatactctggactccagtactctgggttttttaattgtcgaggctcaagtctatttgtaaagctctcatctttttgaattttttcgatacgacttctgatatatctaaatttcttttttatatcgataacgataaccgttgttggttttccgttgcgaatcgcttcaacccttggtttcaaatcgggagaagtgaaaataatcatctcattttcaagtgcggccagacgctcaaagtaactaaaataaacatcaacactacgagctagtttttcacggaaccctttattagcagtccaatcccctctaccaatgtcaaaatatgcagtgataattgtggtggaacttttcattactaataagaccattaatataaaaaaagaattatatcataaatattaatagaatgtatactgtatattatccattcaaatgcttccgttatttatcatacatcggaatattgatactaaagcactattcacatgcaaaaccaacatccgccatgaaggactagctaaaacccaaactagtttgttgcaattagcatccttgcacctctatgtaaagggctgaagggattcggatgtgatggtatgattacagacattcgtgtctgagattgtctctgactccataattcgaaggttacagttatgatcatcgttaccggcggcgcgggctttatcggcagcaacatcgttaaagccctgaatgataaaggcatcaccgatattctggtggtggacaacctgaaagacggcaccaagtttgtgaacctggtggatctgaatatcgcagactatatggataaggaagacttcctgatccagattatggctggcgaagagttcggcgatgtcgaagcgattttccacgaaggcgcgtgctcttccaccaccgagtgggacggcaagtatatgatggataacaactatcaatactccaaggagctgctgcactactgcctggagcgtgaaatcccgttcctgtacgcttcttccgcagccacctacggcggacgcacctccgactttattgaatcccgcgagtacgaaaaaccgttgaacgtctacggttacagtaaattcctgtttgatgaatatgttcgtcaaatcctgcctgaagcgaacagccagattgttggcttccgttatttcaacgtttatggaccgcgtgaaggccataaaggcagcatggcgagcgtcgctttccatctcaacacccagcttaacaacggtgaaagtccgaagctgtttgaaggtagcgagaacttcaaacgcgacttcgtctatgtgggcgacgtggctgatgtgaatctgtggttcctggaaaatggcgtttccggcatcttcaatctcggtactggtcgtgcggaatccttccaggcggtagctgatgctacgctggcttatcacaagaaaggccagatcgaatacattccgttcccggataaactgaaaggccgctatcaggcgttcactcaggcagatctgacaaatctgcgcgcggcgggttacgacaaaccgttcaaaaccgttgctgaaggtgtaacggaatacatggcctggctgaatcgcgacgcataagagctctgcatgaaaatactggtgatcggcccgtcttgggttggcgacatgatgatgagccaaagtctctatcgcacgctccaggcgcgctatccccaggcgataatcgatgtgatggcaccggcatggtgccgtccattattaagccggatgccggaagttaacgaagctattcctatgcctctcggtcacggagcgctggaaatcggcgaacgccgcaaactgggtcatagcctgcgtgaaaagcgctacgaccgcgcctacgtcttacccaactccttcaaatctgcattagtgcctttcttcgcgggtattcctcatcgcaccggctggcgcggcgagatgcgctacggtttactcaacgatgtacgcgtgctcgataaagaagcctggccgctaatggtggaacgctatatagcgctggcctatgacaaaggcattatgcgcacagcacaagatctgccgcagccattgttatggccgcagttgcaggtgagcgaaggtgaaaaaagttatacctgtaatcaatttagccttagtagtgaacgtccgatgattggtttttgcccgggtgcggagtttggtccggcaaaacgctggccacactaccactatgcggagctggcaaagcagctgattgatgaaggttatcaggtggttctgtttggcagcgcgaaagatcatgaagcgggcaatgagattcttgccgctttgaataccgagcagcaggcatggtgtcggaacctggcgggggaaacacagcttgatcaagcggttatcctgattgcagcctgtaaagccattgtcactaacgattctggcctgatgcatgttgcggcggcgctcaatcgtccgctggttgccctgtatggtccgagtagcccggacttcacaccgccgctatcccataaagcgcgcgtgatccgtttgattaccggctatcacaaagtgcgtaaaggtgacgctgcggagggttatcaccagagcttaatcgacattactccccagcgcgtactggaagaactcaacgcgctattgttacaagaggaagcctgacggatgcgggttttgatcgttaaaacaagcagcatgggcgatgttctccatacgttgcccgcactcactgatgcccagcaggcaatcccagggattaagtttgactgggtggtggaagaagggttcgcacagattccttcctggcacgctgccgttgagcgagttattcctgtggcaatacgtcgctggcgtaaagcctggttcagcgcccccataaaagcggaacgcaaagcgtttcgtgaagcgctacaagcagagaactatgacgcagttatcgacgctcaggggctggtaaaaagcgcggcgctggtgacgcgtctggcgcatggcgtaaagcatggcatggactggcaaaccgctcgcgaacctttagccagcctgttttacaatcgtaagcatcatattgcaaaacagcagcacgccgtagaacgcacccgcgaactgtttgccaaaagtttgggctatagcaaaccgcaaacccagggcgattatgctatcgcacagcattttctgacgaacctgcctacagatgctggcgaatatgccgtatttcttcatgcgacgacccgtgatgataaacactggccggaagaacactggcgagaattgattggtttactggctgatagtggaatacggattaaacttccgtggggcgcgccgcatgaggaagaacgggcgaaacgactggcggaaggatttgcttatgttgaagtattgccgaagatgagtctggaaggcgttgcccgcgtgctggccggggctaaatttgtagtgagcgtggatacggggttaagccatttaacggcggcactggatagacccaatatcacggtttatggaccaaccgatccgggattaattggtgggtatgggaagaatcagatggtatgtagggctccaagagaaaatttaattaacctcaacagtcaagcagttttggaaaagttaagtagtttataaaggtaaaacatgctaacatcctttaaacttcatagtttgaaaccttacactctgaaaagtagtatgattttagagataataacttatatattatgtttttttagtatgataattgcattcgtcgataatactttcagcataaaaatatataatatcactgctatagtttgcttattgagtctaattttacgtggcagacaagaaaattataatataaaaaaccttattcttcccctttctatatttttaataggcttgcttgatttaatttggtattctgcgtttaaagtagataatagcccatttcgtgctacttaccatagttatttaaatactgccaaaatatttatatttggttcttttattgttttcttgacactaactagccagctaaaaagtaaaaaagagagtgtattatacactttgtattctctgagttttctaattgctggatatgcaatgtatattaatagcattcatgaaaatgaccgcatttcttttggtgtaggaacggcaacaggagcagcatatagtacaatgctaatagggatagttagtggcgttgcgattctttatactaagaaaaatcatccttttttatttttattaaatagttgcgcggtactttatgttctggcgctaacacaaaccagagcaaccctactcctgttccctataatttgtgttgctgcattaatagcttattataataaaagtcccaagaaattcacttcctctattgttctactaattgctatattagctagcattgttattatatttaataaaccaatacagaatcgctataatgaagcattaaatgacttaaacagttataccaatgctaatagtgttacttccctaggtgcaagactggcaatgtacgaaattggtttaaatatattcataaagagtccttttagttttagaagtgcagagagtcgcgctgaaagtatgaatttgttagttgcagaacacaataggctaagaggggcattggagttttctaacgtacatctacataatgagataattgaagcagggagtctgaaaggtctgatgggaattttttccacacttttcctctattttagtctattttatatagcatataaaaaacgagctttgggtttgttgatattaacgcttggcattgtggggattggactcagtgatgtgatcatatgggcacgcagcattccaattatcattatatccgctatagtcctcttactcgtcattaataatcgtaacaatacaattaattaagaataaacaagtttaagaagtgagttaaaactcacttcttatctatacaacttaatctctttacactattagttaaagtttcagtatcgatatcttttaccgtatatgttggggatactatttgtatagatttatgatgattcggggaccaaattaaatggctgggatattccggagtacgactattagggtaaaatgcaagcgttggtttatgataagccgcagcgatatgaacaagagctgtatcaacagaaatgacaaaatcactatacttggtcaacgcaacggtataaataaactcatcaaatggtagtgtttcgatttcaagtattggtattgtcaataaatcttgcggtaacccggtaaatataatccgataattttcaaagtgtgttttcacttcttgatatataacttttatttgctcaaacgtaagacggcatattttttttgcacctaatggattaataatgactattcttgtatctccaataaattcttttattttatcttcaacatctactggtaaatgcaagtcgtagttggtggaaaatttaccctcaccataaatatgcttcagtatttctattgctcgtgtactcatatgttcttttaaacattcatcgtggggatggtaaaaactatagtaacgcttataccaatgatcaaaacccagaatgtaagaatcttttaaactacttaatattaagctatgcttaaaactgggcatagtttcaaaggggtctaatacaatatcgaactgtaaatcccgcagatgcttacatagagtaagcatttcaagaaaaccggtactttctttaatacagaactcaaatatatttttattattagagagaaattccccaccctttctatttgtgagaagagttattttaacccctttactataaagttcacgataaatgctacttaatacaattagatcaccaagtttattattatcatgaataataaggcaacttttaacttgtgctggatctgtaatttgattatttattttattacgaaataaaaaagaaaggaaattaatcttgattttgtttatataaaatcttttctttttgtgaaaagttcctaagcgcatttttataccatattattttagtttcaggatgattaattagcataagaatcggtactagttctatattgcattttttttcttgtcatatctttactttcttctgcactgatgtcttgaagtttaataaatggaattacatcgtaagaaatagctgtatcatcacttaaattataaatattaatatcttttacattatcatgcataaaacgaaaaaatggcaatattttgaataaatccctacttaattcgctgggcatgggatttttattctcatcatagaaacgagaacagctacccgttaaatcaagaccagaacaaataatccgcgcatacttaagactatatgcgatttgaattgcagcaaaggcaatagtatggcaactgcaataaccaagactaatgtccttgcaaaatccaaccagacgaccttttttagacaacggtacagagatcagcagttctttgtgaatctgtctcaaaatattaaatttaatcttctttataaaaccacctttttcccgacggtaaaaggaccgtaatacgaggcagttctggaggatataaagtttatcttctttggaagcgtgttcataaacgtcaacgtttactatggtataacgacttctctggctaaatttataaaaatcatcacgacgctgatgtaaaaatcggacatctgtaagtacatatataaaaggaacgatattattacttaacagatattgcgcagaaccattgacagcaataatatcctttgttcgtaatacactcaaaggtgttttttggcttgtagggccgctaagaaaaataataacatcatcagatattttattttcaatcaggttttcaacatcttttttgtcaatgtatctaatattcttcatgataaacctgtgaaataaataactccgcttaaaactgtcctggtgaagacatgtaattgtgggattttttttagcgcgctggtttccctttcaaacgccgcataaaattgcgcatttttttacgatatactaaaagataatagcctagatctctaatctcatttttaataccgtaatgacgctctaagtcaatacgatctttcgctttacgctgcgcactagcacgctttccggagagatcgataattcgaacctcaccattttttataatgaagttaccacgatgggggtcgccagaaaccatgccatgttgatgtaaggcattaatactttgctgaattttattttttagcgcatcatcaatatcgggcatatcacacaactctatgccatcaatatactcgatgatcatgatataagtatggacaaaacgtaaggttttccgttcagccaataaataaaagtcattgagtgtatttaacccttcatttcgtactttttgggtttgctcaaaaaggcgttcgtaataatcaccttttaacagagacttaaagaaacgttcgttacgcttaactttcggagaaaaaaccttaagaatcaatttaccgtaatcggtatcaataagcataacttttgtatcatcaatagaacgaaaaaccttgatgatatttatattataagacaagaagtcatttaatacattgaggtacttactattgttttcatcggtaaaaacaaccaagtctttgatcttgctcttctgaatcataataaaccagttaaatgttatttacggtaatattttcggcaaagataacagactcctgctataattcctgagatataatgatgttgcactaaaagatgtttatatcttttttaaattcaataattgatttcgcatctcgtggagagtcatctttccagggggaattttctaaagctattttatagtattttaccgatggataaattgcccatttgtgccacggtttagttgcacctgtataatgaataagaagagtactttctgtaatcagctttttatagttttgatgtgttttgtcttttaattcacttttaattgtataaattgtattgtactcacgaggcaaaaataatgtcatccctttcagtaagacattcataacatcctgatcagggtatttataaacattatctttactcataagaatagacaacgctttttctgttagttttgcgtcagcccattttcttaagtctaaataaacgacaccggaattaaagtactgcccaagtaattcaggatcagacaacctggataccgccttttcttgcattggctcaacatctttaacaacagcagcaaccgctccatttaaacccagatgtaatagttggctaatatcgcctttacaaacaacatctgcatcaagataaagcaaacgatcaagcgttaaacccaataattgaaatgcaaataaacggaagtacattgctcttgaccagacctgtgtacaaggcaagcactggagcttatcagtgttaattctatataacgtgattcttaattggttttgctctgcaagctttgcaattttttgaaaaaaaccatcattataaacatcagcaataatataaaaatcaagattaatatgtcgattatttaggacaattgatgtgatggaaacacctacaccatcaagataattagcatcgacaccataggcaacatttaaacattcagaagtatttatattagctagccgaaaatcccaggctttaactttatctatctctatggcaggaaatgagtccacaatgctacccttatatcattactttatagtttcccagttttaatgctttatcttttcaataaaataaaaaagatagttgctaaatccttttagatatctatgctttttaagcatatgttttgcgctatatcttaattgattgctattgttcggtttcagcaacgccgtattcttccatgggctagcattttttgcctccataaaggcttgacttacaggataatcccaggcccaatcatgccagggcttggttggcccgatataatggataaaaatagtatcgttggttactgggtttataaagctttctttgagttgataatttaagctgaactgggtgttatatttaatatcagcgaaaataagtttatccgccagcaacatatttaacacatcctgatcaggatgtgttatttttttgattatttctggctcatttagcattgcaatagctcgtgcagaaacctgctgagccgcccattgggcagtattaatcaataaaaaaccggagttaaagtaacctttagcaattcccgcaacacctaagctatgggcgcgtttttcccaccagtcagcttgcccttctgtaacaaccattgcgactttatcgtcaggaaaactgaaattaattagtggctcaatagtcccctgacaaatgatatctgcatccagataaaggactttaggcgccttattaataaagtaatctgcaataacaaaacgaaaatatattgcatgagtccaattcttagtgctaggcaaactgcgcagtcgatcaccattaatcagatatattttaattctggttttatactgcaacgccagggcatcaaaatacttacgatcatcatcaccaaaataatcagtaaaaatatggaaacacaatcgacttccttcattatattttaatatactagcaatgctaattccgcaaccaaatagaaagtttttgtcagttccataagcgatgtccagacaaagattttctgtttctactttatgatcataatcaataacactattaagaaactcagtttcctggaaaaacacctgctgcattatttcctccgggaaatagcagaaataattaccttatgtaatctatcgtaatacttgctttggtaaaattcatcgatgctcgcaggaattttttcatgttcgatatgaatttcacctgctatatatttatttagaagagttacaaaaccagcaatatctcccggttgatacagatggccattgacatcaggttgaataatgtcagcaggcccggagacacaatcggcactgatacaaggaatcccccagctcaaggcttcaagtagggtcattgggaaaccttcaaaagaactcgtgagcaataacgcactcactttttcaatatcttgctggaccaattcccagggatattgttgccaaccataccagacaattcgatcatcaatatttaattctctaccataagcctggcatttttcgaaatcggagccatcacccaatacatggagtttccagttacctttcgcttgacttaagccatcaagcaggtctttaactcttttctggccttcaaatttcatacgcccaacataaataaacgttgccgtttcaccttcctcgggcgcgggaatgacactgtctttagtttcgacgggattaaaaataacatttatcgtgctttctgctacacctcgattaatcatttgctgtttaatgccagagctgattgctaaatgatagtcggcacaggtgatatattcagcatgttttttgtgatctaaagaaaaatgtggccaactaaatactggcatatcaattccactttttttacgtgcttttgcggcaaacaggcaggagatcacatcaatacaaataacgatatctggttggtactcctgaagccatttacttagagcatgaatatgtttcgcccgacgcaaaaaacctaaacgaatattggaaaaactacaactgtatttaataccttccagccatcccttatccattttgtcattacgacaaaagaaaaacatttcactttggatatgttgttgcctgaaggtagtaataacatcacggatgacagtttccatgccgccaaatccagaaacagcttcgccgataaacgctattttcatagaaactctcattaattgagtaaaactcactgttttaacggttttatttgtctataaaatcagaaacaatcgtactcatcattttatctggactgaatttatataaactatcataatccattggtttaacagaactgttaataaaatactctaacttatcccaatcatcatgacctattataaaaaagcgagattcactatagatttcactaccaaatacatttatattattagtaattaattttttattgaaaaatagtgcctcaagtatacgaagagtccagccagattggttttctttggttatatcaacaattatattagcatttaatgttcttctaatattctcttcataagatatttgtttttcaatcaaatacttactagtcgtagaacttgtcttatctttgacaacattaaaatctagcttacatcctagtgttgttaatctctcggctaactcattaattatttgaagacgccctttatcacgaccaaggaaaaaacatattggctggctgttatttttgtcagataaactataatttctaatttcatccattcctataggaaaaaattgttctattgccttgatcttttcattccctataaatctatgctcaaaatcatatataatatcgaaataattcgcgttatcaagaataaaatcttcgccaacagtatttcttagaagcaaaactttatgacagttaatattttttaatatttgtttattgatacctttattaacaacactgtcattaatgataattatgtcatcttttttaatatcattgaggtaatgcttgatgaataatcgccccagccatgcattatccatccctattttacttatttttttattaatccagttatatttttttggtgttgttatattttttatcttgtacttttttttcaggtactgaatcatttttaattcataatctgcaacccaatttataaaataaatagtcataataaagttagttccagtacatactaataaatatttttataatcctttgcgttgtgttcgctctttaatacgctcggccttaacgcttgccatgttcaataaattctgttcaagagacaatattttgcgtaaaggcatcccaaaataaaccttcataaatcgccagatatctctttgcgtcaggccaatattcatactactgaaatataaaccaatcaggtctttatcgcgccagcggcgcggtacttttgcacgtatctgtgcccgatgcagatcgataacactaatttttaattcatcttcccggccagtaaatggcaaatgaagcaaaaagtggcaaatgtaacagtcgcggtgatttatccctgcagtatgcattttacgcaccatagttgctacacgtgcgatcagcatacgcttaacacgtatatcaggcgggttgactgcccaatcggcacaataatcttcaaggctaattgtgggagtgagatcttcggtaataataaaacttgcgcgagttaatggatttaaccctttttcgccaaacccaatgcccttcattgtatcaacgccaacatcactcaggcgatgaatagcgtgccactctctgtctgcgcccaaaacgggcatccgcaaactgagtagattttttataatctcttttaatgtcgtccccttgtgccatttaagaaaatagcttttcccggacagttcaaagcgtaatgtacgacgagtctccagttcacgaaagacctcgccgttcagttttttgacctctgcaaaagcatctttaccacgccaaagtgtggcaagcggctcttttaattcaaccatctaaaccacctgtaatgatatccgcggctttttctggcaagctatacaaatcctgagtatcggcataatggcgagcattctccgcccaggccattcgcaatgggctctgagttaacgctttacgtaaaacttcatttaattgttcctgagagaaaggttcagcgatgaccgttccacaattggcatccgcaatataatgcgcgtacccacataccgctgttgttaaaacaggtaacccagcagtgatcgcttctagaagaacgatacccgcggcttcctgataagcgggatgcagtaataaatcagcggctgccattaattcactcacatcattgcgaccgaagaagaaatgcacattgctccgcacgccgagtttttctgccagcgcttcaaattttcgcggcttatcctgaccaacaacaaataaaagcgtattgtgacgtaaactttccggtaagcttgccaaagcttcaatactgcgatctacacctttacggccaaaatcacttccaacctgcagtaataagttttgttgctcttttatgccatttttctggcgataaatttcacggctgtttgggatttgctcactgtattttctgtccggataaataccgggaggaagaatttgaaaacgttcaggttcagtttgataatgcttctggaaatcggcgatttgcttatcggtcagcatcataagtttcgtgcttttaccctgctcgaaagtcgctcgctcaaatgcggcataatggcgatatcgacttgttaaacgatataaaaaacctttttcttgcgcaactttctcggcgtaacaaacatcagcggcaaaataaacatccaggccaggcatcttattaaacccaacaacgcgatctgcgggatgctctttgagatgattttgtacccaggcataatattctgcattgcgtccatggttggtatgggacttaactggcacctgaataagctcaaatgctttcgggcaatcgccttcccagctctgtgtatatacccgaacatggtggccccgtgcggcaactgtacttgcaatgcgcataaagtcacgttgaagcccaccaaatggaaaatatttatataaacaaaacgccacgatcataattgtgcattcctgtcagcactaggggcatcttctggcaacagcttttccgtagcggcgatcacatcctccgctgggataacagaaagatattttttgttgcggtcaagttcatgccgggtcggcattttctgataattccccgcccagaattgaataatattctcggtccagggacgccagaatacgtgatccgttgcaccaaatagactaatgactggcgttttcactgccgctgcaatatgtcccggcgcagaatccacaccaataaaaagcactgcatgatcaattaatgcacccagttcaggaaaacgtgttttacctgcaaggccagtaatgggttttgtttcgcaacctcgtgcaatctcatctacacaagcgagatcatctgcgctgggcccacaggttagcacaacctgatagcctcgctgttgcagcgcatcgataaccttagaaaatttatcgttatcccaacacttaaatatctgacgcgctgtcggttggatgacaacataatgatcttttacgcccagggcatctaattcccggcgcatcttcttccagcaatcttcggcgtaactcattgttgtgtcggtgtagaaatcggtaatacctaatggctcaaggacgcttaaattacgctcaacaatatgtgtaccgtgtattggcgctaagtgtgtgaagctttttttccaaataccatgctgccgatgaccataaagttggcttattttcatccgtgcaggtaaacaacgtaccagcagcgccaccatccactgatccgtaagattaatgaccaggtcataattattcgcacgcagagtttttatcaagctaagcacatttttaattttatcgaaagttcccgcacctttattgcttatcccatagagcgcattaatttccgggttttcagacaaaatagggatggtgtcctgataaagcagcatatcgatttttgcatcaggataattctgcttgagcgtactgatgacaggagtagttaataacatatccccatgatatcgcatctttatgaccaggatttttcgaaatggcttttccactagcgactcttttgtgtgattgtctggttaagttaagcagaaaaaagcacgctaccgccccaggctcaacagctacctgaatactgataacgcacttactttgacgtgctagtgtatcatttctttcgcagcaatccgacccgaatgatttttatacacaaaatatactttaatcataaaaatcaaatagataaaaaatagcatttcgataatgtcagtacggcctatgtagatttgaaaatggggccgagtttcaatgaatcgcataaaaatacaaaaaaaatgaagatgtagcggcagatcagaccaaactgaagctatttaagtcaaaaacgggaaaagtaatggtaaagccacagctaaatacatagaatccccagcacatccataagtcagctatttactatgctcgaattgctttacaccgcccttctctaccttattcagccgctgatctggatacggctctgggtgcgcggacgtaaggctccggcctatcgaaaacgctggggtgaacgttacggtttttaccgccatccgctaaaaccaggcggcattatgctgcactccgtctccgtcggtgaaactctggcggcaatcccgttggtgcgcgcgctgcgtcatcgttatcctgatttaccgattaccgtaacaaccatgacgccaaccggtagcgagcgcgtacaaagcgctttcgggaaggatgttcagcacgtttatctgccgtatgatctgcccgatgcactcaaccgtttcctgaataaagtcgaccctaaactggtgttgattatggaaaccgaactatggcctaacctgattgcggcgctacataaacgtaaaattccgctggtgatcgctaacgcgcgactctctgcccgcagcgccgcaggttatgccaaactgggtaaattcgtccgtcgcttgctgcgtcgtattacgctgattgctgcgcaaaatgaagaagatggtgcacgttttgtggcgctgggcgcaaaaaataatcaggtgaccgttaccggtagcctgaaattcgatatttctgtaacgccgcagttggctgctaaagccgtgacgctgcgccgccagtgggcaccacaccgcccggtatggattgccaccagcactcacgaaggcgaagagagtgtggtgatcgccgcacatcaggcattgttacagcaattcccgaatttattgctcatcctggtaccccgtcatccggaacgcttcccggatgcgattaaccttgtccgccaggctggactaagctatatcacacgctctagtggggaagtcccctccaccagcacgcaggttgtggttggcgatacgatgggcgagttgatgttactgtatggcattgccgatctcgcctttgttggcggtagtctggttgaacgtggtgggcataatccgctggaagctgccgcacacgctattccggtattgatggggccgcatacttttaactttaaagacatttgcgcgcggctggagcaggcaagcgggctgattaccgttaccgatgccactacgcttgcaaaagaggtttcctctttactcaccgacgccgattaccgtagtttctatggccgtcatgccgttgaagtactgtatcaaaaccagggcgcgctacagcgtctgcttcaactgctggaaccttacctgccaccgaaaacgcattgaggttgttatgcaaaaacgggcgatttatccgggtactttcgatcccattaccaatggtcatatcgatatcgtgacgcgcgccacgcagatgttcgatcacgttattctggcgattgccgccagccccagtaaaaaaccgatgtttaccctggaagagcgtgtggcactggcacagcaggcaaccgcgcatctggggaacgtggaagtggtcgggtttagtgatttaatggcgaacttcgcccgtaatcaacacgctacggtgctgattcgtggcctgcgtgcggtggcagattttgaatatgaaatgcagctggcgcatatgaatcgccacttaatgccggaactggaaagtgtgtttctgatgccgagcaaagagtggagctttatctctagtagcttggtgaaagaggtggcgcgccatcagggcgatgtcacccatttcctgccggagaatgtccatcaggcgctgatggcgaagttagcgtaacgtttatgccggatggtatgccatccggcgcgcatgaattacttctggcactgccgacaataaaacgttgcccgctgcgcatgtttagtcgccacaatcggcgtaccgcacacccgacacggctcaccttttcgcccgtaaacctgcaattcctgagcgaaatagcccggtttaccatcactttgcagaaaatctttcagcgttgtaccaccctgctcaatgctacgcagcaacaccgctttaatcacccgagctaacaattcacactctgccaggctcagactactcgccagccgatccggatggatccccgccgcaaacagactttcgctggcatagatattccctacccctaccaccagcttgttatccatcagccacggtttaatcgccgtttttttcttcgcgcacttctgatgcagatactcaccattgaaatcgtcgctaagcggctccggtccaagatgggtcagcacattatgcccttccagctctttggtccacagccaggcaccaaagcggcgcggatcggtgtagcgcagcactttgccgttgctcatcaccaaatccacatggtcatgcttttcagggggaagttcttctggaaggatgcgcaggctgccagacatccctaaatgaatgataatccagccctcaggcagctccagcagcagatatttagcccgccgctgcacgctaagcactggttggtcgcttaaacggtagatctcttcactaaccggccagcgcaagcgtccgttgcgcaccactgcatgaagaatggttgcaccaacgagatgcggttctatgccgcggcggctggtttcaacttcgggtaattcaggcatagcatctccaggaatgaacagatgcagtcaatatgggggcaagcagataacaaaaaaccccgccggagcgaggttttttgttacatcaaagcgagaattatttgattttcgcttctttgtagatcacgtgctggcgaacaactggatcgaattttttcagttccagtttttccggcttagtacgtttgttcttcgtagtggtatagaagtgaccagtaccagcagaagaaaccagcttgattttctcacgaatacctttagccatgatttatttcctctaagtacttagtacttttcgccacgggcacgcagttcagccagaactgtatcgatgccttttttatcgattacacgcatacctttagcagatacgcgcagggtgacaaaacgcttctcgctctcaacccagaaacggtgagagtgcaggttcggcaggaaacggcgtttagtcgcgttcagtgcgtgggaacggttgttaccggtcaccggacgcttgccagtaacttggcagactcgggacatgtctattctccaaaaatcaaattagctcgagcttcgtatggggtattggcgcctcgtcaggctttacagcccggtcatcgcagttctatgtgaactctcgattgccaggcccaaatgccaaacccgagattctcaaaggtggcgtagtatacgctgactcagcgatgtgctcaagtcccgaacagacaaagatcccgaaggatcgcgcatagcgggttaaatccagccgcgttcggcaaaagaaacatactctccacgcccaatcacgatatggtcgagcacgcgtaaatccatgaactgacaactctttattatccgttcagtaatgagtttatccgctttactgggttcagcacaaccgctagggtgattatgtgcaaggatcagcgcgctggcgtttatttttatcgcttcgcggataatttcccgaggatggacttcaacatggtttagcgtgccggaaaaaagacgcctatgcgttataacccggtgttgggagtcgagaaagatcaccataaagatctcccgctcctcacccgtgagctggctttgtaaaaattccctcgtcatctccgggctgagtaaagggctttcttcacgcatccgcacgttgtagtaacgccgcgccagttcagcaatcccctttaactgggcaaatttcgccacgccaattccatgaacgccactaaattgttcatattcagaggttaacaagccataaagagagccgaaattctccagcatctcttttgccagggttaatacatctttaccgcgcgttccggtacgcagaaatagcgccagcagctcgacatccgttaaggcgctaataccaaacttcagcattttttcgcgcggcatcaacagctgactattgtttttcaccttcacctcctttgtggtgctcgcatcctgtcatagccgtttcgttaaatcgacggccagttttcaatcctggaaagcgcctcgcaaagtgaatctcaggtgaaggcacgacaacaaaagtattgtgataaaatcgccaacttctggtgtcaccctacaggaaaaatcatcatgagcctggccggtaaaaaaatcgttctcggcgttagcggcggtattgctgcctataaaacccctgaactggtgcgtcgtttgcgcgatcgcggggccgacgtccgcgtagccatgaccgaagcggcaaaagcctttatcaccccacttagcttgcaggcggtttctggttatcccgtttccgacagtctgctggacccggcagccgaagccgctatgggccatattgagctgggtaaatgggctgatttagtgattctcgcccctgccacggcagatttgattgcccgtgttgctgccggaatggcgaatgacctggtaagcacgatttgtctggctacacctgcgcctgtagccgtgctccccgccatgaaccagcagatgtaccgtgccgctgccacgcagcataatttagaggtgcttgcttcccgtggtttgctcatctgggggccagacagtggcagtcaggcttgtggtgatatcggtcctgggcgaatgctcgatccgttaaccattgtggatatggcggtagcgcattttagccccgtcaacgacctgaaacatctgaacattatgattaccgccggcccgacgcgtgaaccgctcgatccggtgcgttatatctctaatcacagctccggcaagatgggttttgctatcgccgccgccgctgcccgtcgtggcgcgaacgtcacgctggtaagtggtccggttagtctaccgacgccaccgtttgttaaacgtgttgatgtgatgaccgcgctggaaatggaagccgccgtgaatgcttctgtacagcagcaaaatatttttatcggctgcgccgccgtggcggattatcgcgcagctaccgtggccccagagaaaatcaaaaagcaggccacgcagggtgatgaattaacaataaaaatggttaaaaaccccgatatcgtcgcaggcgttgccgcactaaaagaccatcgaccctacgtcgttggatttgccgccgaaacaaataatgtggaagaatacgcccggcaaaaacgtatccgtaaaaaccttgatctgatctgcgcgaacgatgtttcccagccaactcaaggatttaacagcgacaacaacgcattacaccttttctggcaggacggagataaagtcttaccgcttgagcgcaaagagctccttggccaattattactcgacgagatcgtgacccgttatgatgaaaaaaatcgacgttaagattctggacccgcgcgttgggaaggaatttccgctcccgacttatgccacctctggctctgccggacttgacctgcgtgcctgtctcaacgacgccgtagaactggctccgggtgacactacgctggttccgaccgggctggcgattcatattgccgatcctagtctggcggcaatgatgctgccgcgctccggattgggacataagcacggtatcgtgcttggtaacctggtaggattgatcgattctgactatcagggccagttgatgatttccgtgtggaaccgtggtcaggacagcttcaccattcaacctggcgaacgcatcgcccagatgatttttgttccggtagtacaggctgaatttaatctggtggaagatttcgacgccaccgaccgcggtgaaggcggctttggtcactctggtcgtcagtaacacatacgcatccgaataacgtcataacatagccgcaaacatttcgtttgcggtcatagcgtgggtgccgcctggcaagtgcttattttcaggggtattttgtaacatggcagaaaaacaaactgcgaaaaggaaccgtcgcgaggaaatacttcagtctctggcgctgatgctggaatccagcgatggaagccaacgtatcacgacggcaaaactggccgcctctgtcggcgtttccgaagcggcactgtatcgccacttccccagtaagacccgcatgttcgatagcctgattgagtttatcgaagatagcctgattactcgcatcaacctgattctgaaagatgagaaagacaccacagcgcgcctgcgtctgattgtgttgctgcttctcggttttggtgagcgtaatcctggcctgacccgcatcctcactggtcatgcgctaatgtttgaacaggatcgcctgcaagggcgcatcaaccagctgttcgagcgtattgaagcgcagctgcgccaggtattgcgtgaaaagagaatgcgtgagggtgaaggttacaccaccgatgaaaccctgctggcaagccagatcctggccttctgtgaaggtatgctgagtcgttttgtccgcagcgaatttaaataccgcccgacggatgattttgacgcccgctggccgctaattgcggcacagttgcagtaatatgacgccggatgacttttcatccggcgagtttctttaaacgccaaactcttcgcgataggccttaaccgccgccagatgttccgccatttccggcttctcttccaggtaagcaatcaggtctttcagggtgatgatagagatcactttgcagttgtaatcacgctcaacttcctgaatcgcgctaatctcgccgcgcccgcgttcctgacgatcgaggctaatcaacacgccagcaagcgtcgcgccattggcctgaataatctccatgctctcgcgaatcgccgttccggcggtgatcacatcatctaccagcattacgcgtccttgtaacgcgctaccaaccagattgccgccttcaccgtggtcttttgcttctttgcggttaaagcagtacggcaggtccaggtcgtgatgctccgccagtgccacagcggttgtggtggcaatcgggatccctttgtaagcagggccaaacagcagatcgaactcaatgccggaatccaccaacgcttcagcgtaaaaacggcctaacagtgccagatcgcgcccggtattaaacagcccggcgttgaagaaataggggcttttgcgcccggatttcagcgtaaactcgccaaactttaacacctgcttgctaagcgcaaattcaataaactggcgctgatatggtttcatgccttcgctcctcatcttacttttctacagacaaaaaaaaggcgactcatcagtcgccttaaaaatcagtttgccagcgccgccttctgcgtcgttacaatggattgctttcccctcgggccagagccaacaagatgagtagctcttcatgggtgaacggctcgccttctgccgtcccctgcacttcaatgatgcgcccgtcttcggtcatcactacgttcatgtcggtctctgcggcagagtcttcaacgtattccagatcgcaaaccgcttcgccgttcacaattccgacagaaactgcggctaccatccctttcatcggattggttttcagcttgccgttttccaccagcttctgtagcgcatctaccagcgccacgcaggcacccgtaatgctcgcggtacgcgtgccaccatcagcctgaagcacgtcgcagtccagcgtaatggtgaactcacccagcgctttcaaatctactgccgcgcgaagagcacgggcgatcagacgctggatttccattgtgcgtccaccctgcttacctttcgccgcttcacgagcgttacgggtgtgggtagaacgtggcagcatgccgtactctgcggtgatccagccctggccctgacctttcaggaagcgcggcacgccttcttcaatagaggcggtacacaacactttggtatcgccaaattcgaccagcacgctgccttctgcatgttttgtatagttacgagtcagggtaacgggacgcacctgattattgctacggcctgctggacgcatattgaaatctccggcttgaaacaaatgtggctgcgcattatacggacttccggcggttattcctatcctgacaaggcatcgatggctataatccttccacctctccttttataaacaggaacgtctatgatccgcagtatgaccgcctacgcccggcgtgaaatcaagggtgaatgggggagcgcaacctgggaaatgcgcagcgtaaaccagcgttatctggaaacttactttcgtctgccggagcagttccgtagccttgaacctgtcgttcgcgagcgtattcgttctcgcctgacgcgcggtaaagtggaatgtaccctgcgctatgagccagatgttagcgcgcaaggtgagctgatcctcaacgaaaaactggctaaacagctggtaactgccgcgaactgggtaaaaatgcagagtgacgaaggggaaatcaacccggttgatattctacgctggccgggcgtgatggcagcccaggagcaggatcttgacgccattgccgctgaaattctcgcggcgctggatggtacgctggacgactttattgtcgcgcgcgaaaccgaaggtcaggcactgaaagcattgatcgagcagcgtctggaaggcgtcaccgccgaagtggtcaaagtccgctcccatatgccggaaatcctgcaatggcagcgtgagcgtctggtcgcgaagctggaagatgctcaggtgcaactggaaaacaaccgtctggagcaggaactggttctgctggcacaacgaattgacgttgccgaagaactggatcgcctcgaagcgcatgtcaaagagacctacaacattctgaagaaaaaagaagcggttggtcgtcgtctggattttatgatgcaggagttcaaccgcgagagcaacactcttgcgagcaagtctatcaatgccgaagtgacaaactccgccatcgagctgaaagtgttgattgagcagatgcgcgagcagattcagaacatcgaataactcgtaacgccaattcttacttttccgccttcacaaatgccgccactcaaacagagcggcatttttcttccccgcaacattcaattctgttttgcgtgcctgctccagattttgcgatgtttttttgcccagcacactgagaacgcgagatactcacaactgtatataaatacagttacagatttactttctttgcaattgatatcacatggagtgggcaatgaacgaacatcatcaaccttttgaagagataaaactgattaatgcaaacggagcagaacaatggagtgcaagacaacttgggaaactactgggttatagtgagtatcgtcactttatacctgtattaacgcgcgccaaagaagcctgtgagaacagtggtcacacaattgatgaccatttcgaggagatcctcgatatggtcaaaattggcagtaatgccaaaagagcattaaaagacatcgtactctcccgctatgcctgttacctggtagtacaaaacggcgaccctgcgaaaccggtcattgcggcagggcagacttattttgctatccagacccgacggcaggagcttgctgacgatgaagcatttaagcaacttcgtgaagacgaaaagcgtctgtttctgagaaatgagttgaaagaacataacaaacaattggttgaggcagcacagcaagctggggtagcgacagctactgatttcgccatatttcagaatcatggttaccaggggctgtatggtggattagatcagaaagctattcatcagcggaaggggctgaaaaagaatcagaagatcctggatcatatgggtagtacagaactggcggctaatctctttcgagctacccaaacagaagaaaaactcaagcgggatggcgtgaatagtaaacagcaagcaaacaccacacactttgacgtgggtcgcaaggtgaggcaaaccattcaggaacttggcggaaccatgcctgaggagttgccgaccccgcaggtcagcatcaagcagttggaaaacagtgtaaaaattacagagaagaaataacagaaactaaaaactctttttgttgattgagacacccgatgcgtaagccaaggtccaggtgcagtgaacacaatggctaaatattgcacctttcttttccccctcagttttaacctattttttcttatgcattttctcagacaagaagtcagaagaatgcatctctgctacagaaaatagcgatttcacataactacaagttatcaatttcccctccccttaaaaaatctcaatcgtgacaatgcgcacaaatcgctaccctgccagacagatttttagggagagaaccatgctgttatacattttgtatttggttggcattactgccgaagccatgacgggggcgctggcggccggacgacggcgcatggatacatttggcgtaattattattgcgaccgccaccgcaattggcggagggagtgtgcgcgatattctgctgggccactatccgctcggctgggtcaaacacccggaatatgtgattatcgtcgctaccgccgcagtactcaccactatcgttgctcctgtaatgccttacctgcgcaaagtgtttctggtgctcgatgcgctcggactggtggtcttttctatcatcggggcacaggttgcactggatatggggcacggcccaattattgccgttgtcgcggcggtaaccaccggcgtgtttggcggcgttttgcgcgatatgttctgtaaacgtatcccactggtattccagaaagagttgtatgccggtgtcagttttgcctccgccgtgctgtacatcgcgctgcaacactatgtttctaaccatgatgtggtaattatctccaccctggtattcggcttttttgcccgcttactggcgctacgccttaagctgggattaccggtcttttactacagccacgaaggacattaaggttcaaaacctgtgatctgctgggcagccagccaactgcccagcttcttgatttgcgcattttccttccattcaataacctgtctggcgcgtccgcttccagtccccggcagctgctgccagaactgctccgtgctaaataaaagttggctccaggaccgttcatcactggcattaagcgccgcccgggttagcggtattcccattgccatcacccagcgagtaaaaggctgcttacgagccagattaaactgatgccatagctgcgcacttttacttttcgcgatccccggcgtgttctgtaattgctctggcgttaataaaagccaggaaaagatatgttcaaagcgatgagtctgatgcagcgcgcgccaaccggcctcaccaatgccatccagcccaagaacctgttttgcccccagccagactaagcgactaatgaactgttcctgacaaacatcagaagcaaagtagcaggtcaagctgttaaagcggttttctggcggtgtcggttttgtacgttctgcaccgcgccacaccacatcatcaatgcgaggaataccctgaccggcaaggctgacgagaatctgatcaccaggcgcaatatcccactcctgccagcgcctgacggaaccaatattcacccgctggacttttttatcatccagcatgacaggtgcgagactcgcaaccacgcttattttaccgctcttacccaccgcaaactgaattgccttcacttcggcaacctgagctacaggttgatatttccaggccaccagccactctgcctggcccggtagccaatggcgggattctggctctttcgccgctcgtacaactacgccatcggtgacgaagggtaattccgctttccaccactcattgcgtacgcgcgcaacttcatcagcatttttcaccgcacgggtatacgtctgcgttagagtaaaacctgcggtagccagctcttttaaacgatcagacattaactgcggtccatccggccatgcccagacaaaaacgcccagagaattcagcgtgtcgctatcgtcctggcgcatcatcaagccagcaacttttgcgcgggcatttattccccccatttgttgttggatatgcccctcgcgctggagaaatatttccccctgaagcgtactgttggctaaaggcccgctaacggtttgcggcacagcggaaattaagctaactttctgcgtccagtcctcgcctttcaggccattaccgcgactgattgctttgttcagtttcccgtcccgataaaccagggttaccgcaacgccatcaacttttggctgcacccaaagatcgctacgttctcgcatccacagacttaatgcgtttttatccaccattttgcgtacacccgtatgggcaaccggatgcataaccgcaccatttaaaggcggcatcatcacgtcgcggggctcgctcccaaagcagcgttgccactgcgtaagacgggcgcttaactgatcgtaaacaccgtcttccacctcactttttccttccttccagtagtcatcgtcccactgttttatttgctgttgcaggcgggaaatttcttcctgtgctctggctgggctccaggccggacagaccgcccacacagaactttgccagcacaagatacctattaatatcgccatccatactttcatcatcacctccgctgtagatagtcaggcagatatacaacgtgatgaaagcaaagccgagtggcaaaaacggagtctgcgaggacgcttcctgaaaatcgtctttattgcagtgaatgacaggcaaatgcggaagcagctacgcaaaacgcaacaactttgcgcaaaaagtgtgagcaagggctacgtcacatggccgcgccgtgtataataagctcgtatgtaggctttatttcgctaatcacatacgaaagatactcatggctcaaggcacgctttatattgtttccgcccccagtggcgcgggtaaatccagcctgattcaggctttattaaaaacccaaccgttgtgtgacacccaggtttctgttagtcacaccacacgccaaccgcgtcctggtgaagtccacggtgaacattatttctttgttaatcatgatgaatttaaagaaatgattagcagagatgcgttcctcgaacacgcagaagtttttggtaattactatggcactagccgtgaggccattgagcaagtactggcgaccggtgtcgatgtttttctcgatatcgactggcagggcgcgcagcaaattcgccagaagatgccgcacgcgcggagtatctttattttaccgccgtccaaaattgaactggaccgccgtctacgcggtcgcggtcaggacagcgaagaggtcattgcaaagcgtatggcgcaagctgttgcagaaatgagccattacgccgaatatgattatctgattgtgaatgatgacttcgataccgcgttgaccgatttgaagaccattattcgcgccgaacgtctgcgcatgagccgccaaaagcagcgtcatgacgctttaatcagcaaattgttggcagactgaacctgatttcagtatcatgcccagtcatttcttcacctgtggagctttttaagtatggcacgcgtaactgttcaggacgctgtagagaaaattggtaaccgttttgacctggtactggtcgccgcgcgtcgcgctcgtcagatgcaggtaggcggaaaggatccgctggtaccggaagaaaacgataaaaccactgtaatcgcgctgcgcgaaatcgaagaaggtctgatcaacaaccagatcctcgacgttcgcgaacgccaggaacagcaagagcaggaagccgctgaattacaagccgttaccgctattgctgaaggtcgtcgttaatcacaaagcgggtcgcccttgtatctgtttgaaagcctgaatcaactgattcaaacctacctgccggaagaccaaatcaagcgtctgcggcaggcgtatctcgttgcacgtgatgctcacgaggggcaaacacgtagtagcggtgaaccctatatcacgcacccggtagcggttgcctgcattctggccgagatgaaactcgactatgaaacgctgatggcggcgctgctgcatgacgtgattgaagatactcccgccacctaccaggatatggaacagctttttggtaaaagcgtcgccgagctggtagagggggtgagcaaacttgataaactcaagttccgcgataagaaagaggcgcaggccgaaaactttcgcaagatgattatggcgatggtgcaggatatccgcgtcatcctcatcaaacttgccgaccgtacccacaacatgcgcacgctgggcagtcttcgcccggacaaacgtcgccgcatcgcccgtgaaactctcgaaatttatagcccgctggcgcaccgtttaggtatccaccacattaaaaccgaactcgaagagctgggttttgaggcgctgtatcccaaccgttatcgcgtaatcaaagaagtggtgaaagccgcgcgcggcaaccgtaaagagatgatccagaagattctttctgaaatcgaagggcgtttgcaggaagcgggaataccgtgccgcgtcagtggtcgcgagaagcatctttatagcatttactgcaaaatggtgctcaaagagcagcgttttcacagcatcatggacatctacgctttccgcgtgatcgtcaatgattctgacacctgttatcgcgtgctgggccagatgcacagcctgtacaagccgcgtccgggccgcgtgaaagactatatcgccattccaaaagcgaacggctatcagtctttgcacaccagcatgatcggcccgcacggtgtgccggttgaggtccagatccgtaccgaagatatggaccagatggcggagatgggtgttgccgcgcactgggcttataaagagcacggcgaaaccagtactaccgcacaaatccgcgcccagcgctggatgcaaagcctgctggagctgcaacagagcgccggtagtagctttgaatttatcgagagcgttaaatccgatctcttcccggatgagatttacgttttcacaccggaagggcgcattgtcgagctgcctgccggtgcaacgcccgtcgacttcgcttatgcagtgcataccgatatcggtcatgcctgcgtgggcgcacgcgttgaccgccagccttacccgctgagccagccgcttaccagcggtcaaaccgttgaaatcattaccgctccgggcgctcgcccgaatgccgcttggctgaactttgtcgttagcagcaaagcgcgcgccaaaattcgtcagttgctgaaaaacctcaagcgtgatgattctgtaagcctgggccgtcgtctgctcaaccatgctttgggtggtagccgtaagctgaatgaaatcccgcaggaaaatattcagcgcgagctggatcgcatgaagctggcaacgcttgacgatctgctggcagaaatcggacttggtaacgcaatgagcgtggtggtcgcgaaaaatctgcaacatggggacgcctccattccaccggcaacccaaagccacggacatctgcccattaaaggtgccgatggcgtgctgatcacctttgcgaaatgctgccgccctattcctggcgacccgattatcgcccacgtcagccccggtaaaggtctggtgatccaccatgaatcctgccgtaatatccgtggctaccagaaagagccagagaagtttatggctgtggaatgggataaagagacggcgcaggagttcatcaccgaaatcaaggtggagatgttcaatcatcagggtgcgctggcaaacctgacggcggcaattaacaccacgactagcaatattcaaagtttgaatacggaagagaaagatggtcgcgtctacagcgcctttattcgtctgaccgctcgtgaccgtgtgcatctggcgaatatcatgcgcaaaatccgcgtgatgccagacgtgattaaagtcacccgaaaccgaaattaatgttttatgaacccaacacgttatgcacgcatctgcgaaatgctcgccaggcggcagcctgatctgaccgtctgcatggagcaggtccacaaacctcataacgtttctgcgattattcgtaccgcagatgccgttggcgtacatgaagttcacgccgtctggcctggtagccgcatgcgcaccatggctagcgcagcggcgggtagtaacagctgggtacaggtgaaaacacaccgcaccattggcgatgccgtcgctcatctcaaaggccagggcatgcagattctggcaacccatctttctgataacgctgtcgatttccgcgaaattgattacactcgcccgacctgcattttgatgggacaggagaaaacgggcatcacgcaggaagcattggccctggcggatcaggacatcatcattccgatgatcggcatggtgcagagcctgaatgtttccgttgccagtgccctcattctttacgaagcccagcgtcagcggcaaaatgcaggcatgtacctgcgtgaaaacagcatgttgccggaagcagagcaacaacgcctgttgtttgaaggcggctatccggtgctggcgaaagtcgcaaaacgcaaaggcctgccttatccccacgtcaatcagcaaggcgagatcgaagctgatgccgactggtgggctactatgcaggctgcagggtaagtgccatgaaaggtcgcctgttagatgctgtcccactcagttccctaacgggcgttggcgcagcacttagtaacaaactggcgaaaatcaacctgcataccgtgcaggatctactcttacaccttcccctgcgctacgaagatcgcacccatctctaccccatcggagaactactgccgggcgtttatgccacggtggaaggcgaagtgctgaactgcaatatctccttcggcggtcggcggatgatgacctgccagatcagcgacggttccggcatcctcaccatgcgctttttcaatttcagcgcggcaatgaaaaatagcctggcggcgggccgccgtgtactggcttatggcgaagcaaagcgcggtaaatatggtgcggagatgatccacccggaataccgcgtgcagggcgatctcagcacgccagaattacaggaaacgctcacgccggtttatccaacaacggaaggcgtaaagcaggccacgctgcgtaaattaaccgaccaggcgctggatctgctcgacacctgcgccattgaagaactcctgccgccggaactgagtcaaggaatgatgacgctaccggaagcgttgcgcactttgcaccgcccgccaccgacgctacagcttagcgatctggaaaccgggcagcatccggcgcaacgtcgtctgattctggaagaactgctggcgcacaacctcagcatgttagccttacgtgccggagcacagcgttttcatgcccagccgctgagcgccaatgacacgctgaaaaataaactcctcgccgccttaccgttcaagccaacgggcgcacaggcacgcgtagtggcggagatcgagcgcgatatggcgctggatgtgccgatgatgcgtctggtgcagggcgatgtaggttccggtaaaacgctggtcgccgccctcgccgcgttgcgtgcgattgcccacggcaaacaggtagcattgatggcaccaaccgaattactcgccgagcagcacgccaataacttccgcaactggtttgcaccgctcggtatcgaagtgggctggctcgccggtaagcagaaaggtaaagcacggctggcacagcaggaagccatcgccagcggtcaggtgcagatgattgtcggtacacacgccatcttccaggaacaggtgcagtttaacggcctggcgctggtgattatcgacgaacagcatcgttttggcgtgcatcagcgtctggcattgtgggagaaaggccagcagcagggcttccatccgcatcagttgatcatgaccgccacgccgatcccccgcacgctggcaatgactgcgtatgccgatctcgataccagcgtgatagatgagctgccgccaggccgcacgccagtgactacggtcgctattcctgatacccgccgtaccgacatcattgaccgcgtgcaccacgcctgcataactgaaggtcgtcaggcatactgggtttgtacgttgattgaagagagcgaattgctggaagcgcaggcggcggaagctacctgggaagagttgaaactggcgctaccagagttgaacgttggcctggtacacgggcggatgaaacctgccgagaaacaggcggtgatggcgagctttaaacaaggtgagctacacctgctggttgccacaaccgttattgaagtcggcgttgatgtgcctaacgccagtctgatgattatcgaaaacccggagcgtctgggtctggcgcagttacaccagctgcgcgggcgcgtaggtcgtggcgcggtggcttctcactgcgtgctgctctacaaaacgccgctttctaaaacggcgcaaattcgcctgcaagtgctgcgcgacagtaacgacggttttgtgattgcgcaaaaagatctggagattcgcggccctggcgaattgttaggcacgcgtcagacgggtaatgctgaatttaaagtggcggatttactgcgcgatcaggcgatgatcccggaagttcagcgcctggcacgccatattcacgaacgttacccacaacaggcaaaagccctgatagaacgctggatgccggagacggaacgttacagcaatgcgtaaaaggcggcagtgagaagaccgccatttcaggttaccctaccttcctgccggatgcgattcatcaccctacaaattcaataaattatgaatcaatacgcaggcttgataagcgaagcgtatcaggcatttgtctttgttgcggcggcacttctaccgccgcttcatcggttaaccggcaaaaatcggcaacatcaaatacaacttaattaccagcgcattgacgatatcgataaagaacgcaccgaccatcggcaccaccaaaaacgccatgtggcccgggccaaagcgttcagtgatcgcctgcatgttggcgattgccgttggcgttgcaccgaggccaaaaccacagtgacccgcagccagcactgccgcatcgtagtttttgcccatcatgcgccaggtaacgaagatggcatacaacgccatgaagatggtctgtaccaccagaatcgccagcatcggcagcgccaggctagccagctcccacagtttcagccccatcaacgccatcgccaggaacaagctcaagcttacgttacccagcacggataccgcacgctcaaagacgcggtaaaagcccattatactcagaccgttgctcagaatcacgccaacaaacagtacacagacgaaggtcggcagttcaaaagcagtgccagccaaaagttgcgcaacaattttccccaccgtcaggcagatagcaatcagcgcgatagtttcaatcagcaccaagctggtgatcatgcgtcccacatccggcttttcaaacgccgtcgggacttcctggtcatccggaataccgttcggcgtggtggagtgtttcaccagatagcgcgccaccggaccgccaatcaagccgcccagcaccagaccgaacgttgcacaggccatcgccacttccgtcgcattggtgaagccataacgttcaatgaacaatttactccacgcagcgcccgtaccgtgaccgccggaaagagtaatagaaccggccaacagccccatcagcggatcaagccctaacaagctagccataccaatgccaatggcattttgcatcaccaacagaccaacaaccacaatcaagaagatgccaaccacacgcccaccggcacgcaaactggcaatgttggcgttcaggccaatggtggcgaagaaagccagcattaacggatcgcgcagggacatatcaaagttgacttcccagcccatgctttttttcagtactagtagcgccagcgccaccaacaaaccacccgcaacaggttccggtatggtgtatttcttcaaaaaggagacggaatggaccaacttacgcccgagcagcaacgtcagcgttgcggcaacaagcgttgctaaagtatcgagatgaaacatagttactcctttgtatccgcatcactctttcatactcgtcatacttcatcgcgcagtggcaacttcatgaactatgacgggtatcgagttatgctttcctgggtcaaattctcagctgttaatgaacaaatggcatggattttaagcagaaaaataccaaaagttatataaaaaagtgcatttatctcatttaaatatttagatgaggatgtggcaaacgtttgcttttctctttcggtcagctaaaatgcccgctttgctaccacgggattgttttcgatgtctgtttccaccctcgagagtgaaaatgcgcaaccggttgcgcagactcaaaacagcgaactgatttaccgtcttgaagatcgtccgccgcttcctcaaaccctgtttgccgcctgtcagcatctgctggcgatgttcgttgcggtgatcacgccagcgctattaatctgccaggcgctgggtttaccggcacaagacacgcaacacattattagtatgagcctgtttgcctccggtgtggcaagcattattcaaattaaggcctggggtccggttggctccgggctgttgtctattcagggcaccagcttcaactttgttgccccgctgattatgggcggtaccgcgctgaaaaccggtggtgctgatgttcctaccatgatggcggctttgttcggcacgttgatgctggcaagttgcaccgagatggtgatctcccgcgttctgcatctggcgcgccgcattattacgccgctggtttctggcgttgtggtgatgattatcggcctgagcctaattcaggttgggttaacgtccattggcggcggttacgcagccatgagcgataacaccttcggcgcaccgaaaaatctgctgctggcaggcgtggtcttagccttaattatcctgcttaaccgtcaacgtaacccttacttacgcgtggccagtctggtaattgcgatggcggccggatatgcgctggcgtggtttatgggcatgttgccagaaagcaacgaacctatgacgcaagaactgattatggtgccaacgccgctctattacggtcttggcattgaatggagtctgctgctgccgctgatgctggtctttatgatcactagcctggaaaccattggcgatatcacggcgacctctgacgtttccgaacagccagtgtccggtccgctgtacatgaaacgcctgaaaggcggcgtgctggcaaacggcctgaacagctttgttagcgcggtgtttaacaccttcccgaactcctgcttcgggcaaaacaacggagtgatccagttgactggtgttgccagccgctatgtcggttttgtcgtcgcgctgatgttgatcgtgctgggtctgttcccggcagtgagcggttttgtacaacacattccagaaccggttctgggcggcgcaacgcttgtaatgtttggcaccatcgccgcctccggtgtgcgtatcgtttctcgtgagccgctgaaccgtcgggcgattctgattatcgcgctgagcctggcggttggtctgggcgtgtctcagcagccgctgattttgcagtttgcccctgaatggctgaaaaacctgctctcctccgggatcgccgcgggcggtattactgccatcgtgctgaatctgattttcccaccagaaaaacagtaattcactggcggcggtaagataattaccgccgcagtctcacctctttaaccattcccgccttgaggattgcgcgtaaatcgtgcataactcccttatgtgcatttcacgggatggaagaccatgaaatttattgggaagctgcttctctacattctcatcgctctgttagtggcgatcgctggcctctattttcttctgcaaacccgctggggagcagaacatatcagcgcatgggtttccgagaatagcgactatcatctggccttcggggcgatggatcaccgtttttccgcgccatctcatatcgtgctggagaacgtcacgtttggtcgtgatggccagcccgcgaccctggtggccaaaagtgtcgacattgcgctaagcagtcggcaactgaccgaaccacgccatgtcgataccatcctgctggaaaacgggacgctgaatctcaccgaccagaccgcgccgctaccgttcaaagccgatcgtctgcaactgcgtgatatggcgtttaatagcccgaatagcgaatggaaactgagcgcgcagcgggtaaatggcggcgtagttccgtggagtccaaaagccggtaaagtgctgggtacgaaggcgcagattcagtttagtgccggaagccttagcctcaatgatgttcctgccaccaatgtactgattgaaggcagtattgataacgatcgcgttacgctgactaacctgggtgccgacatcgcccgcgggacattaaccggaaacgcgcagcgtaacgccgacggcagctggcaagtggaaaacctgcgcatggcggatatacgtctacaaagcgaaaaaagcctaaccgacttctttgcgccattacgctctgtcccgagcttgcagattggtcgcctggaagtgatcgatgctcgtttgcaaggtccggactgggcggtgaccgacctcgatctcagcttgcgcaacatgaccttcagtaaagatgactggcagacacaggaaggcaaactgagcatgaacgctagcgagttcatttatggtagcctgcatttatttgacccgattataaacacggaattttccccgcagggcgtagcgctgcgccagttcaccagccgctgggaagggggtatggtcagaacgagtgggaactggctgcgtgacgggaaaacgttgatccttgatgatgcggcaattgccgggctggaatataccttgccgaaaaactggcaacagttgtggatggaaacgacacccggttggttaaacagcctgcaactgaagagatttagcgccagccgcaatctgatcattgatatcgaccctgacttcccgtggcagctcaccgcgctcgatggttacggtgccaacctgacgctggttaccgatcataaatggggcgtctggagtggcagcgcgaatctgaatgccgccgccgcgacattcaatcgtgttgatgttcgtcgcccgagcctggcgctgaccgccaacagcagcacggtgaatatcagcgaactgagtgcatttactgaaaaaggcattctggaagccaccgccagtgttagtcaaacgccacaacgtcagacacatatcagcctgaatggacgcggtgtgccggtgaatattttgcaacagtggggatggcctgaattaccgttgactggcgacggcaatattcagcttaccgccagtggcgatattcaggccaatgtcccgttgaaacctacggttagcgggcaattgcatgccgtgaacgccgcaaagcagcaagtgactcaaaccatgaatgctggcatcgtttccagcggtgaagttacaagcacggagccggtgcggtaaacatcaatctcgccgggtacgactcagacgtacccggcattccatcaatagattacaacgtaattgtcagcgcattcccttgaggcttcaccaccagcccctgctcactttcagcctggctaccgtcttgcagaccatttactttcacaacattgcgcaggcacagtgtccagttcttcgcctcgcccgcaccagtcacagtaatcgtgttgccagtacgtgctgcttttaaagtaaagatcacgcttccgtcagcagcgggcacttcacagacggcttcatgcccgtcttgcagattgaagaggtggaatgccgtgccttcgtgccacacgtaatcgggacgttgatcgttgttgcccagcgccagtagagtgttatcacgcacataaacgggcagactcaggaagccgtgctgctgtttatgccagcgactaccgtcgagttcatcgttgtgccacaggtgtgtccagcgaccttccggcaggtagaactgcacatcgcccgcttcagtgaacaccggcgcaaccatcacgttgtcgcctaacatgtattgacggtcaaggtaatcacaagccggatcgtccgggaactccatcatcatggcccgcatcatcggcgtaccccgcgcgttcgcacgcgcagcttcacgatacagatacggcatcatgcggcatttcagttgcgtgaagaagcgcaccacatcacaggactcatcatcgtaggcccacggcacacgataagatttgctaccgtgtaaacggctatggctggagagcaaaccaaacgcgcaccagcgtttgtaaacgtgcgccggagcggtattttcaaagccgccgatatcgtggctccagaagccaaaaccactaaggccaatagacaaaccaccgcgcaggctttccgccatactttcgtagttagcgtaacaatcgccaccccagtgtaccgggaatttctgcgcaccgacggaggcgctgcgggcaaacaagacagcttcttcctcaccaacggtgtccttgagcacgttccacaccagttcgttgtagatgtacgcataatggttatgcattttctgcggatcggaaccgtcaaaccactgaacatcagttgggatacgttcgccaaagtcggtcttaaagcaatcaacgcccatcgcgaccagacctttcagtttgtcggcgtaccatttgcaggcatccggattggtaaagtcataaatcgccagacctggctgccatttatcccactgccataggctaccgtccgggcgtttgagtaaatagcctttctcttgtaactctttaaagacgggggatttttgaccgatataggggttaatccagacgcagattttcagtcctttcgctttcaggcggcggatcatcccttccgggtcagggaaagtcagcgggtcccactcaaaatcgcaccactggaaggctttcatccagaaacagtcaaagtggaaaacatgcagcggcagattgcgttccgccataccatcgataaagctgtttaccgtcgcttcgtcgtagttggtggtaaaactagtggttagccacaggccgaaggaccacgcgggcggcagcgccggacgaccagtaaagcgggtataacgatcaagtaccgctttcggcgtcgggccgtcgataacaaagtattcgagatattcactctcaacgctgaactgcactttggagactttctcgcttcccacttcaaaagagacacactggggatgattgaccagtaccccataaccacggttagtcatgtagaacgggatatttttatacgcctgttcagtacttgtgccgccgtcccggttccaggtctctaccgtctggccattgcgcaccagggcagtaaagcgctctcccagaccgtaaactgtttcgccaacgccaagatcaagccgctcaaacatataattgcgttgattattcgtgtcctgcacgtagccattatttttcacctgactaccggtaatacgttcgccgttgcgcagaaaatccagactccagaactcacctttgctgacacgcgcgcttaagttgccacttttaaactcagcataacgttctgtgttttcgattgtgaccttcacgtcctgcaaaatattgagcggataatgaggaccgttattcagcgccccctgaaaatgctcaatccgcacaccgacaataccttcctgtggggagaaaaagcgcaacgtaaataaaggcgtatcaagctgccaggtacgttcacgcacatcacggggggcagcatagaccaccatttcattatcctgctgttcaacctcgaacacctgaagcgggtgaatcaaattgaggccaggttgaatcaaccagtttccatcgctaattttcattgccgttccttagttctgcacttcttgagaggtgaattgttgctggcaacggcgtttaccctgagccagctgttccataacggttttcagattgtgcgtcgtgagactgtagtagcgtttagcgataatcgcgctcagcaaataacagatcgccggaacaatcgtgaatagcgcaataatgatgctaatcgtggcgctgttctgcgctttttctgccgcatcatatccgccataagccagcatccagccgataagagcgccgccgaaggccaaccccagtttgagcacaaacagcgtgccagcaaaactgatcccggtcaggcgtttaccattgcaccactcgccgtagtcgacggtatcggacatcattacccactggataggtgtcaccagttgatgcaacacaccaatcacgaagatgaagacaaacatagtgatgctggcctgcatgggaacaaagaacatcgcgaggctaatcactgccagcagggcgttcgtccaccagaagatagtgactttacatttccagtcggtcagaggttttgccagtgcggaaccaatcaggttacccacgcaataagtggtgagaaaagcgacaaacacttccggcgtgcccaaaatccatgtgacgtaatacatcatcgccccaccgcgtacgcacaccgccaggatattgaaaatggttagtaaaccgacaatccgccactggtcgttttgccagatatcacgtaaatcttcccgcatagacgttgttgtaggtggtgcttcaacgcgttctttagtggtgaagaaacaaaatgccagcatcatgaatgccaccacggaaaggaccgcgataccgccctggaaaccgagtggtttattatcaccgccaattaaattaaccagtggcatcatcagaacagtagaaagcatgcctcccgcggtcgccagcacaaaacgccaggattgcaggctgatacgctgagtcgggtcattggtgattacaccacccaatgcgcagtaagggatattgacgacggtataaagtaaggtaagtagggtgtaagtaattgctgcatagatcattttgccgttcatactgagatctggcgtgctataggccagtacacagacgatcccgaatggcagtgcgccaaacagtacccacggacgaaatttaccccagcgagagcgcgttcgatcggccaacaaccccatgcaaggatcggaaatcgcatccagtgcacgagcgaccaaaaacatggttccgacaaaaccggcaggaatgccaaaaatatcggtataaaagaacatcatatataacattacgttatcgaaaataatgtggctggcggcgtctcccatgccataaccaattttctctttaacggacaacacttcactcttcatctgcttttccttgatgctataggggtgctgagaccgataacgcattttgtaaaccatccctgtgagagcgaatattccgatatctggttattaatttatgattcttgttttatgtgatcgtggtagcgttaattccgctcatatatcattgtaaaatatgggttttatatgaactataatgctttcgtgataatacgctgcgtgtattaggcggaaaaaactgatctgggggatgtagaaactcaaggaagtagctataatgcgccccgcctccatgtagcaatcgaggcgcggaagatcgtcgtctccggtgaggcggctggacttcaaatccagttggggccgccagcggtcccgggcaggttcgactcctgtgatcttccgccaaaatgcctctcctgacgttctccaaccccttgtaatactgtcaatccagatattttctactgctcaatattcaatcggcttcaggaatacctggtctaaggttttgtgatggacgatgagcggctgaagaatccgcctgtcggttcttctgtcctcgaacgcatccgcgatattcacgccagtatgcgccgtgtttatttgcaggtgatttgcccccctgctgactctcagccaactgtatcgccattaaggtgaagatgttgttttactcgccccagaacacccttttttatacgactattctatttctttaaccgctggcgaaaaaaactgactataaacttcaccaataatcagactgccatcaagattaatttgttcatttaatatatcaaatcaacttgttttatttttactatcaaaaatagctcattgccttactataattaatatataaattcggtaattaattcttaacatgcttttactaataatctcaattgctggccctataatattgcgctagcattgctttctggttgtatcagcgatactcaaaaattcttaatacaatactcattcgactggtacttatttgtaactcagttatattttttcgcccggtgattcagaagaatgcaaaaaacggctaccactccaagtaaaatacttgatctcactgccgcggcatttttacttgtcgcctttctgacgggtattgcgggcgctcttcagactcctaccctaagtatattcctcgcagatgaactgaaagcccgtcctataatggtaggttttttcttcaccggtagcgctattatgggaattctggtcagtcaatttctggcaaggcactccgataaacaaggcgaccgtaaattactgattctgctatgttgcttatttggagtgctggcctgcacgctttttgcgtggaatcgcaactacttcattctcctcagtacgggcgtacttctgagtagttttgcttccaccgcaaacccgcaaatgttcgccctcgcccgtgaacacgccgacagaacaggccgtgagacggtcatgttcagtacatttttacgtgctcagatcagccttgcctgggttatcgggccaccgctcgcttatgaactggcaatgggatttagttttaaagtgatgtatctcaccgctgccatcgcatttgttgtttgcggactgatagtctggttgtttttgccaagtatacaaagaaatattcctgtcgttacccaacccgtagaaattttaccctccacccacaggaagcgggatacgcggctactttttgtggtctgtagtatgatgtgggcggcgaataatctctacatgataaatatgccgctatttattattgatgaactgcatctaaccgataaactgactggagaaatgattggtatcgctgccggtctggaaattccgatgatgttaatcgcaggctattacatgaaacgtattggcaagcgactattaatgctcattgctatcgtgagtggaatgtgtttttacgccagcgtactcatggcgacgactccggcggttgagctggaattgcaaattcttaatgccatcttccttggtattctctgtggtatcggcatgctttattttcaggacttgatgcctgaaaaaataggctctgcgacaacgttatatgcaaatactagtcgcgtcggctggattatcgccggctctgttgacggaattatggttgaaatctggagctaccatgcgttgttctggctggcgatagggatgttgggtattgcgatgatttgcctgctgtttattaaagatatttaactcaccagtctgggctaagaaaaatcggcgtggcgcaaacagagccatcctcgccatttttgctatcatgcctgcatacataaacgacaaaacagtatgcagagggaaaaatgggttccaccagaaaggggatgctgaacgttctgattgccgccgtgttgtggggaagtagtggggtctgcgcgcaatacatcatggagcaaagccagatgagcagccagtttttgactatgacgcgtttgatattcgccggtttgattctactgacgctgagttttgttcatggcgataaaatcttttctattattaacaatcataaagatgccattagcctgctgattttttccgtggttggcgcgctaactgtacagctcacttttttgctaaccatcgaaaaaagcaacgcagccacggcaacggtgctgcaattcctcagtccgacgattatcgtcgcctggttcagtctggtgcgtaaaagccgcccgggcattctggttttctgcgctattttgacaagcctggtcgggacttttttattggtgacacacggtaatccgacgagtttaagcatctctcctgccgcgttgttctggggcattgccagcgcatttgctgctgcattctataccacctatcccagtacgctaattgcccgctatggcacgttaccagtcgtcggctggagtatgctgattggcggtctgattctgttgcctttttatgccagacaaggaacaaactttgtcgttaacggcagtttgattctggcgtttttttatttggtggtcattggtacgtccctgacatttagtctgtacctgaaaggagcacaattaattggcggtccaaaagccagcattttgagctgtgcagaaccattaagtagcgcgctactctctttgctgttgctggggatcacgttcacattaccggactggctgggaacgctgctgattctgagtagcgtgattttgattagtatggattcccgtcgccgcgccagaaaaataaatcgtccggcgcggcataagtgagaattaccagccaggcaccgcgccaccgttaaaaatggtttctgccgctttagcgacttcgggactttgataagattgcagaaattccttcacgttttctgcattcttattatcttcccgtgccaccaaaatattcacatacgggctattcttatcttcaataaatacgctgtcgtgcaccggagaaagcccggtctgctgaatgtaagtggtgctgataatcgctacatcaactttgggatcatccagtacgcgcgggagctgcgccccctcgagttccataatctgcaaatgacgaggattatcggttatatccagcgcggtaggtaataacccttttccctctttcagagtaattagcttctctttttgcaacagtaaaagtgcgcgaccaaggttggtcgggtcgttggggatcgccactgtcgcgccttcttttatttgcgccacggttttgatttttttggaataacccgccatagggaagacaaacgtatttcccaccgctaccagtttataaccatgcgcctgattatcttgttcaagaaagggtcgatgctggaagacattcgcatcaagttcgccatgatttgtcgcatcgttcggtagcaagctaccgctaaatcctaccagttcaacatcgaggccatatttctcttttgccacctttttagcgacttccgcgacatcttgttctgcgccatttataacgccaactttaatgtgttttgcatcgctgctactctggtcgcaacctgccagcagaattccggccagcaataatgcggcccctgtccgtagatgatgtgttgtcagtttcatttttttatccttttattaatgattacctgactatagcggtaaggtcgctgcggtttaaaaaacgaaacgctatcgataagaataaaaaggaataaaagtggaatataaagtctggcacttcttactgaccacgcaagcgcgtttcgtacagcatgatgagagcgatgaaagcaaactacacttatgcttcattcgatacacatttgtaaaaggttgaatccatgaaaccaacgacactactgcttattttcacttttttcgctatgccaggcatcgtatacgccgagagcccttttagcagtctgcagtccgcaaaagagaaaaccacggtattacaagatttacgtaaaatttgcacgccacaggcgagtttaagtgatgaagcgtgggaaaagttaatgttgagtgatgaaaacaataaacaacatatacgcgaggccatcgtggcgatggaacgtaataatcagagcaattattgggaagcgttgggtaaggtagaatgcccggatatgtaagaacagcaacaactactgaccaacgcttctttacctgatatcaggatttcttcattttcacctttgcagtaaccaacaatgcagtcagcaacatcaatgtgccggacaacatcaacgggctagtcagaccaatattatccagcgcataaccgccgattgccgcgccacaggtattagcaagctgaataaccgccacctgaatagacccggctttttctgcctgatcggccaggctgcgggtgatccacgtactccagccgacgggaaccaatgcaaaagttagcccccagataatcgccacgccggtagcaacgattttatcgcttccccacaacgtcagtaccaacgcactcacagccagtattaacggcgcgcctgctaaggccagttttacgctacgtttaagaatgaagctgctaaggctcgtaccaataaagctggcgataccaaaactcaacagcaccagcgttaagccatccacgccgaatcccgccaggttcatatacaccgggcgaatatacgtgaagaaagcaaactgcccggcgaaagacatgaagatggcgatcatccctgccatcacacccggacgttgtaataagcggaaagtattttgtttctgatggctgggttcgcctggcagactaggcaaacttttgataatccagaaaatacacagcacgcccatcaccgccgccgcattaaagacattgcgccaaccgataagctcgcctaaaaaactgcccaacggcgcggcaatcaccagcgcaatagaaaccgcgccgaagatcacgctcagcgccttcggcaccgtacgcggcggcaccagacgcatggtcaggctcgcgctcatcgcccagaacccgcccagcgccagccccagacaggcacgaccgattaaaagcaaactgaaactgttagcaaaggaaaccagcaagcaggagagcgtcagcaaaacggcaaacaaaataacaacgtagcggcggtcagtagcctgaattgtctgggtaataaacaaactggcaaacattgccacaaaggcggtcacggtcacgctttgcccggcaaccccttcgctaatgcctaaatcctgggccattggcgtcaacaaactgacgggcaaaaactcaacgataatcagacaggcgacacaaaacgccacgctgaaaacggcactccagttcggtcgggtgatggcatccgcgccgcggttttcggcaataaattcactcatggtgttacccgtggcatgtttcaggggaaaagcgctccactttaacatactaatgtgactcgcatttaacgtttttgcaacttttacggtgttgctactgctggagttaagatcgaaacggaacagggcaaagattaccggatgcggcgtgaacgtcttatccacccgacaggtcaggcgcggtctgtaggctgataagacgaaacggtttcaatgcaaccagtgaacgccctcggcaggctgaaagaacgcgttatagcgcatctgaaaagcattaatatcctgcatttcaggttcggtttcgcgcagaaaacctagcgccagcctgacctgagcgtcggtaatcggcgcggcgaggcgagctttttgtaaaatccgatgccattgcagcaggttctgttcgctaccatcgacaatgacaatttgccagatgagcaacacctgcgcggcgttttgcaggtggctctcatccggacgatgcaaataacgtaaaaattcgtcaccagcactctttcccatttgatcgaccatgctctccacgggtacgacatcgatgttcagccgatcgctgagacggcgaatcgcttttctggccccggatgtcagcacccgaaaaccaaccacaaacactaccgccagcgtggcgagcattatccagatcatgagttctcctgcgtaatcagaactcatgatatctggaaaccctcgccagttattaatccaccagaataatcttcagtgcaaacagagctgcgaccaccaccacacacaggttcagatcgcgccagcgcccggtgcatactttcatgatgcagtagctcataaagccgagtgcaatcccttcggtgatgctgaaagtaaagggcatcatcaccgtggtaataaacgcaggcacgctttcggtaaaatcatcccagttaacgcgcgccaggctgctagtcatcagcacgccaacaaagattaacgctccggcggttgcgtaaggaggaactatcgccaccagcggactgaagaacataaccaacaggaacataacgccaaccacaaccgcagtcagccccgtgcggccaccgactgccacaccagaagtactttcaatataggcagtaacagagctggtgccgataaacgcacccgccacgctactgacgctatcaacatacagcgccttattcatattggggaatttaccgttaccatctattaagcccgctttatcagttacaccaattaatgttccactactatcaaataggttgatcagcataaaggagaaaatgataccggcgagttcaagtgttaacgcgccgctcaaatctacttcaccaatgacgccgctaatatcaggcggaatggaatagacgccgctaaaatgaacatcaccgaaaaataatccacagcaagacgtcaccacaatagaaaccagcaccgcggcatgaaaatgacgactactcaacacggttataataaaaaaccctaaaatacctaacaacacgccgtgagaacttaaatcgccaatcatcaccagcgtgtctttattggcgacaataacgccagtattttttaatcccattaaggcgataaataatccaattccgctggtgataccaatacgtaaacttaagggaatgttggagatcatccagtaccggatacgaaacagcgtgagcaaaaatagtccaactgcgccccagaatattgcgcccatcccggtctgccaggagatgcccatcgcccccacgaccacgaaggcaaagaaggcgttcagccccattgccggagccagcgccacgggtaagttagcaaatatccccatcgcaatactgccgataccggcaatcaaacaggtggtaacaaacaccactttcgggtccatttgtgccgcgccgaggatttgcgggttcacaaaaacgatgtacaccatggttaaaaaagtggtcatccccgcaatcaattctgtgcggacggtggtcccatgctgaggtagtttaaataatcggctaagcgtcccactttcattactcacgtaatcggtattgtcattattcatttttttgtccattggaggagatttaatcccttgcttttgtaaaacaaatgacaacaacggttcagtgataattatcacatttcaattgcacattaatggatattctttaataatctcgcgacgtttctttatgataaataataatcaaattgataaaatcaaaatgagaaaaatatgaataattctattaaccataaatttcatcacattagccgggctgaataccaggaattgttagccgtttcccgtggcgacgctgttgccgattatattattgataatgtctctattctcgacctgatcaatggcggagaaatttccggcccaattgtgattaaaggacgttacattgccggtgttggcgcagaatacactgatgctccggctttgcagcggattgatgctcgcggcgcaacggcggtgccagggtttattgatgctcacctgcatattgaatccagcatgatgacgccggtcacttttgaaaccgctaccctgccgcgcggcctgacgaccgttatttgcgaccctcatgaaatcgtcaacgtgatgggcgaagccggattcgcctggtttgcccgctgtgccgaacaggcaaggcaaaaccagtacttacaggtcagctcttgcgtacccgccctggaaggctgcgatgttaacggtgccagttttacccttgaacagatgctcgcctggcgggaccatccgcaggttaccggccttgcagaaatgatggactaccctggcgtaattagcgggcagaatgcgctgctcgataaactggatgcatttcgccacctgacgctggacggtcactgcccgggtttgggtggtaaagaacttaacgcctatattactgcgggtattgaaaactgccacgaaagttatcagctggaagaaggacgccggaaattacaactcggcatgagcttgatgatccgcgaagggtccgctgcccgcaatctcaacgcgctggcaccgttgatcaacgaatttaacagcccgcaatgcatgctctgtaccgatgaccgtaacccgtgggagatcgcccatgaaggacacatcgatgccttaattcgccgcctgatcgaacaacacaatgtgccgctgcatgtggcatatcgcgtcgccagctggagcacggcgcgccactttggtctgaatcacctcggcttactggcacccggcaagcaggccgatatcgtcctgttgagcgatgcgcgtaaggtcacggtgcagcaggtactggtgaaaggcgagccgattgatgcgcaaaccttacaggcggaagagagcgcgagactggcacaatccgctccgccatatggcaacaccattgcccgccagccagtttccgccagcgactttgccctgcaatttacgcccggaaaacgctatcgggtcattgacgtcatccataacgaattgattacgcactcccactccagcgtctacagcgaaaatggttttgatcgcgatgatgtgagctttattgccgtacttgagcgttacgggcaacggctggctccggcttgtggtttgcttggcggctttggactgaatgaaggtgcgctggctgcgacggtcagccatgacagccataatattgtggtgatcggtcgcagtgccgaagagatggcgctggcggtcaatcaggtgattcaggatggcggcgggctgtgcgtggtacgtaacggccaggtacaaagtcatctgccgttacccattgccgggctgatgagcaccgacacggcgcagagcctggcggaacaaattgacgccttgaaagccgccgcccgtgaatgcggtccgttacccgatgagccgtttattcagatggcgtttctttctctgccagtgatccccgcgctaaaactaaccagtcaggggctatttgatggcgagaagtttgccttcactacgctggaagtcacggaataataaaaaaagcccggcgtcatgccgggcaaaagtcaccagttacgtttatgccactgtcaactgctgaatttttttctcgcggcggattttgcgttcttccattaccgccactatcgccatcaggcagatacaaccaatcgcggcgatatccagcgcggcgaaggtgcctgcccagccggtaaggccgaataccggcgtcccatcggcaatcattcccagacctaacttggcaaagctgtcaccaatcaggtaagcaaaggtgcctttaataccatcggcagcgccaatcgcttttttaggtacaaagccaacagcagccacaccaatcaacaattgcgggccaaagaccaggaaacccaacgcaaagagagaagccagatagatatattcgttactggcatgttgatacacaccgagcgtggcgataatcagcgccagcgcgatgcaggccaccaggccacggcgaccgttcgccaggtcagagagccagccccacagcagcgtaccgaccagcgcaccagcttcaaacagcgtaaagccctgaatcgccaccgctttagagagtttcagttcctggaacgcgtatacggtactccactggtcgataccaatacgtaccacatagaggaaaatgttggcgaagcacagcagccagatcactttgtttttcagcacatactcaacaaagatctgccacttggtcatatcggtagattctgtctctttgtcctcttcgctgatctcctcgccgaacagttcttcagctttgccgaggccataagattccggggagtcgctgccgtaacgcaggccgataaaaccgacaatcagcgcgataatgctcgggaagataaacatgccgatgacatggccatcgaacaggtaatttgccccgaacagcgccacacctgctgcgcctgcaccgccaaggttgtgagaaatattccagaaaccgaggaatgtcccgcgtttacgacgcggcgtccatttggtgatggtggagtaactgcagctaccgccggtactctggaaaagccgcttaaggcgtagaaggcaatcatcaggaacaggctaacgctgccgctgcccatactggcactgaagcccagcatacaaatagcagagaggatcagcatgaacggcaggaattgtttggtgtttttgccgtcggcgtagtaggaaaccagcgttttacccacgccataagtgatggagaaacccaggccgatcatccccagctgcgtcatgctcaacccgtaggtgctaatcatatcgttctgcgcgatgttaaagttcttgcgaatcaggtacatcgtcaggtagccgataaagaccaccaggtaggattgcatgaacggtttgaaccacattttgcgccgcacttcgagcggaaggtccagggtcggcttgcgaacctggtttaagaaagccagcatgggttactcctgaaatgaatacctgcgtgaggcatgcattgtaaaaatcagcagcaaatcaggcctgagatagcgtccaggcaaaacctggaaaatttcttagttttgccggatatgaagtgaaaaggtgagatgcatcacgcttcgcgcggtgtctgggcgttcaaaaagggcagtaacagcagtgcggaaatcccggcggcgatagagataaccacaaaaaatccgctccagtgccaggtatcgagtactttcgccagcggccaaccagcaaggctcgcccccagataagcaaacaagccgacaaaccccgtcgccgcccctgccgcctctttgtgggaacactctgccgccgccataccgattaacatctgtgggccaaagacaaaaaaaccaatggtgaagaagcaggttgcctgcatcacgtagctggcaaatggcatcagccacagggagccgacactaagcaaaattccggcggcgaaaatcaaattcatcggccctcggttgccgttaaacaatttgtcgctgccccaaccggctaccagcgcaccgataaatccgcccagttcaaacatcgtcactgccgtattcgccgtgaccagatcgacgcccagtgtctcggacatatacaaattgccccagtcgttgatcgccgcccggaccacatagaccagcacatagcaaaagctaagcagccagatatacggattcagcaacacatatttggtgaggatctctttacgcgtcaaccctgccccttcttgttgttgagcaatttccagcgcgtcgtgtcgccattcaccgaccgccggtaaacctaacgcctgcgggcgatcgcgtagccgccagcagagaaaaatccccacgactatcgccatacaaccagcaatcatcatcccggcacgccagccgtaatgcagcgcagccgctgccatcacaatgggaatgagtgcgccgccgacgttatgcgccgtgttccataatgcccaccaaccgccgcgctcggtacgactataccaggccgttaacagacgcgcacacaccggactaccccagccctggaaaaaggcgttcagcacccagagcacggcaaacgcccataggctcgtgctgaagccaaacagaatgttgataatgcccgtggcgataagccctatccccataaaataacgggcattactgcgatcgctgacaatgccggagacaaacttgctcacgccataggtaatgtaaaacagggtcgctaacaggccgatatcgctacggctgagcacgccgttagcaaggatttctggtacggcggcgttaaaacttttccgcgtgaagtaaaacagcgcgtaacccagccagatggtcagcagaatatgccgacgccagtagcgatagcgggcatcaatttcatatttatcagtcattaatggcgcatcggcaggcgctttcagaaacggcaacatcatcaaaccttagacatagcgttgaggtagagaaacgctgacacgcgtgccgtgcagacaggaaatgtgtaatgtgccacccagcgccgttacgcgctcgcgcattccggtgaggccaaaaccttgttgcccggaacccggcggcaaaccgctgccatcgtcttcaataaccagcatcaaccgttcatcctgctgccagccttgcagggtgaccgcgctggcatcagcatgtttcacaatgttgttcagcccttcctggcagacacgaaacagcgtcacgcgctggttttcgcttaacgcactttcatcgattcgccattcgagatggctgacaataccgcgcccttccagctccatttcccgcatcagactgcggatggcctgctccagggtgagatcatccaactggcgcggacgtaaccgacccaacaaacggcgcaccgcgtcgtaaacgcccaggcttagttgttcgatgagctgcccgctctgcttcacgctggcgttatctgccgccagccgctgaacaatgcccgcctgagtacgaatagcagtgatggtctgaccgatatcatcatgcagctcacgcgccacatcacggcgcacgctctcttcggtttccagcaaccgttcagccagatgctgattgcgcgccagttccttttgcaggctctggttaagttcacgcaaccgctggatgccagcgccaagcaacaaccctgtcagactttgcaccagcaggctgagcaataaatccaccggatgatcgcgccaggtttgactggcgatcagcgcgatggcgttcatcaacgtcgcaatcagcgccccttgccaaccatagtgccaggccagcgcgataatcggcagcgccagacagaatggcgtaaagcggctcagttcgtccggcaatcccaactggagccagagactgataacaaacagcagcaagtaccagaccagatgtcgcccgcgccagttgattggctgagaaaccagactcggaccgagcggcagccaggtgttattggcgagatagtgccagaacaccagacatatcggggccagcgtcaggccgccagttaaagtcagcaacagcgcattccagctctctttgccgtgccaaagccagggcaggctctgcaacaacgccgccgccgttaacgccgccccctgtaacagcaaggtgcgccagtcacgctgatggcgatagcggctgatcagcgctacgggcagtaacgtcagtaaactaccgatcatcaataacggaaaatgggttaaaccgaccgcctgcgttagccagtaaatcagcagccactccgcgcccagcaatacgggccagtatccgcgcgggcattgcagcattagccccagacgcagaccaaacggaaataacagcaccgccatatcagggcgctcaaccagatgcaggctgatactccacaggcaaaaccatgcggcagagaagataaaaaagcaggcaataacggtaattaagcgggagaacaacgtcttcatcaccagccatcaaacatgcggcgcgccagctctacgtcgttactgacgcccagtttttccatcagattggcgcgatggacgtgtaccgttttcggactcaagcccagttcggcggcaatctctttcaccgccattccttgcgccagtttttccgccacctggcgttcacgtttggttagcgggtcctgacgaccggatgccagtttaatggcaatatccggcgtcagataacagccgcccgtggcaaccgtatgcaccgcagcaatgagttcatccgggctacagcgtttggaaagaaagccgcgtgcccccgcgttaagcgcctgctcaaccagcgcaggactgtcgtgaacggagagcataatcgtcgccatacctttcggcagctggcttagcagctccagaccggagatatcgggcatggagatatcgcaaatacacacctgcacaccgcgccccggcagccccgccagcgcctcgcgcccgctaccaaactcggcaactacctgcaaatcaggttccagccccagcagctgcgcaaagccggagcggacgatgaggtgatcgtctataagggcaacggtgatcatggtcttgtcctggcgggtaaaaaaaatacgcgcttaccttaacgataagcgcgatgttgttcaagccttgagcggttactgaaaaaacaccgcgatcttgttaaacatcgtcggatcggactgattacgctgcactttcacgacatcttccagcttatcgatttggcttatcatctgctccagacgctggtcgtcattgaccagtagccagatatggcttttgtcgctgtcctgaatcggcagacaaagaatgccttcaacgttaaaagcgcggcgggcaaaaaggccacaaacgtgggtcattacgcccggatggttgcgaacggtgagctccagaattacgttgtcatgagttgtgttttgcatggcttattcccccaccatttcagtattcgccgcacctggcggcaccatcgggtaaactttttcttcggcatcaatgcgcacatggatcagcgccgggccagggcgattgatgatttcctgcaaactagcctgcggatcggcttcgttattcaaatcacaggtttcgaggccgaatccggcggcaatctgcataaagttgattttgcccggataggtggcggcaaaaacgccttgctcgtagaacagactctgttgctgatgcaccagccccagcgcttcgttgttcatcagaatgattttgacatccagctgattttcactggcggtcgccatctcctgaatattcatcatcaggctgccgtcgccggagaaacacaacactttgcgatccgggttcgccagcgcagcgccaatcgccgcaggcaggccaaaacccatcgtgcccagcccaccggaggtcagccactggcgtgggcgattgagcggataagcttgcgcggtccacatctgatgctgaccaacgtcggtggtgataattgcattgtcatcgacacaggcggcaacggcgttgatcaggccgtaatggcttaacggatcgcacgctttcgggattggacacggaaactcacgctgcaaatccgctaccaactggtgccactctgcacgcggttgcgcttccaccagcgggatcaactgcgccagcacgtcatcaacatccgcctgaatcgccacgtgcggctgcttgattttacccagctctgcacggtcgatatcgacatgaatgattttggcattcggacagaactgctcggttttgccaatcgcccggtcatcaaaacgcgcaccgagcactatcaacaaatccgcctcctgcaaaatatagttggtgctgcgcacgccgtgcatccccagcatacccaggctcaacggatgcgcttttggcaacatgcccagcgccattaaagtcatggtggtaggcagttgcgctttctccgccagttcacgcacccgtgcgggcgcattgatcacaccgccgcccagataaagcaccgggcgtttggcagcgttaatcatcgccgctgcgtcacgaatgctttcttcgctaaaggcgggggcggcggctttttctgccatagcgggctgtgtttcaatctcaaaaactgccgtttgcacatccttaggaatgtctatccacaccgggcctgggcggccactttgcgcaatgcggaaggcatcgctcatgacctgcgggagttcttcgatatgtctgaccagatagttgtgtttggtgatggggatagagatgccgtaggtgtccacttcctggaaggcgtcggtgccgatcatgctggcgggaacctgaccagtgatgcaaatcagcgggatggagtccagccgcgcatcggcaatggcggtcaccaggttagtcgcacccggtccgctacaggccatacagaccgccggtttaccgtcggtgcgcgccattccctgagcgataaagcccgcgccctgttcatgacgggccagaatatggcggatttgcgtgctttggcttaaggcatcgtaaacaggcaggatagaaccgcccggaatgcctgtcacaatcttaatgccctgctgttccaggaaatgaacgataaattctgcgccggtaaagcgcttacgcgtgcttgttgtgccgctacttgccatgctccagtccttttcttctgggccgactttccgggaggtgcttaaacgaaaaaccccgcccggtttgcgccggcggggttttggaatcgtgtgttgttccagtccttacggcgcattgccgacgaccaccaccacacgcacgacgaccactgcggcggatggcgcagttggtagtagttttgcgttgagcatggaagtagtcattggggaccttgttggttttgtgtttaacaatatttatacaagcacagctttacaggggagacaatggaaaatttttcagcaagggaaaattgaggggttgatcacgttttgtactgaattgcagataacaaaaaaccccgccggagcgaggtttcgtcagtcgcctgcggctggtaaccgcaaagcacactgtattatgtcaacactgaaagtatacgtgttccgcgcagaacgcgcaatttcggcacgaattttgacgtatttagtgcatagttgagtatcgatcacagtttgcgttttgtccaaatattactgtttatttatacagtaaacttctataatatcactgtacgcaatgtgttatgcgggggccgcatcgttacccggcgcactaagttctggctgaaacgggtggtgccgtcagcgccttaaccccgcgtgagcacactgtgttatgtcaacaagcacaacgtttctccttgagataccgcgtgcacaacagctggcaacaggcagcggaaaggtacgtcagctggcagtgctcctgaaccacaggagacgcgtatgaacctggtggatatcgccattcttatcctcaaactcattgttgcagcactgcaactgcttgatgctgttctgaaatacctgaagtaattcagattcaagtcgcaccaaaggggagcgggaaaccgctccccttttatatttagcgtgcgggttggtgtcggatgcgatgctgacgcatcttatccgccctaccatctctcccggcaacatttattgccgcttttgtttacatattctgccgctaaacaattccccattcctggcgtatatctggctaacattcatcaatgtgatagattcctctcccgcatttatgggaatgcgtagtgacttattctaattatttttataaaagcatccgtgataatgaaaaggcaaagaaacgtcaatttgttattgatgttggtattactcgtggccgtcggtcagatggcgcaaaccatttatattccagctattgccgatatggcgcgcgatctcaacgtccgtgaaggggcggtgcagagcgtaatgggcgcttatctgctgacttacggtgtcagtcagctgttttatggcccgatttccgaccgcgtgggccgccgaccggtgatcctcgtcggaatgtccatttttatgctggcaacgctggtcgcggtcacgacctccagtttgacggtgttgattgccgccagcgcgatgcaggggatgggcaccggcgttggcggcgtaatggcgcgtactttaccgcgagatttatatgaacggacacagttgcgccatgctaacagcctgttaaacatggggattctcgtcagtccgttgctcgcaccgctaatcggcggtctgctggatacgatgtggaactggcgcgcctgttatctctttttgttggttctttgtgctggtgtgaccttcagtatggcccgctggatgccggaaacgcgtccggtcgatgcaccgcgcacgcgcctgcttaccagttataaaacgcttttcggtaacagcggttttaactgttatttgctgatgctgattggcggtctggccgggattgccgcctttgaagcctgctccggcgtgctgatgggcgcggtgttagggctgagcagtatgacggtcagtattttgtttattctgccgattccggcagcgttttttggcgcatggtttgccggacgtcccaataaacgcttctccacgttaatgtggcagagcgttatctgctgcctgctggctggcttgctgatgtggatccccgactggtttggcgtgatgaatgtctggacgctgctcgttcccgccgcgctgttctttttcggtgccgggatgctgtttccgctggcgaccagcggcgcgatggagccgttccccttcctggcgggcacggctggcgcgctggtcggcggtctgcaaaacattggttccggcgtgctggcgagcctctctgcgatgttgccgcaaaccggtcagggcagcctggggttgttgatgaccttaatgggattgttgatcgtgctgtgctggctgccgctggcgacgcggatgagccatcaggggcagcccgtttaagcgcacgtcaccgcagcatcgtcatcagctccatgggagaacgatgctgctttatcagatcacgcatcacccgcatatgcggtgcggagtaagaataaaacgcctgatagcccgcacaaagcacgctgtctggcgtctcctgccgagcgtgcgggcacaggcgatgccagtcgcacgcctggcagtcacagcgcggttgcgggttttcgctgccacaccatttttgtaaggtggcgtcaaaaagctcaatgctgatacgactgatatctgcccgcacccaacactcgaacagggcaattaaaaatttcccccacagctctgctgtcacgctagcggccgtcagatcgccccggtcatcaaattcaagatagggaatgagctgtacggagcggatgccccgctgtttgaaattgtgataaaaatcggcaggttgcagagcatccttgtactctacaaccagtttatgcctgtcctcttcagcatcaatgacctgacttcctgtcatgcgactctctcaataaatacgataagttgatgtatatgcgttacagcaaacagtattgcgagagataacaccgcgagggagatcaaaaatttgtcacggactacgtgaaattgggaaaaatcgctattcgtgacatccattaaattgcgattacgggtgtagtgccagaggatcagcgccacgatggcgagaatgccaatgctaatccagaataacatgcccgcctggtgccagttgtgtttgatagccaacgccatcaacgcgccgtagcccagcatggtacgaaaccacgccagacttgtgcgctccggctgcagtcctgggtcggcaatgcgtctggctttgcggctatccggcatacaacaccagtcccataacgttaattatccggcatacaacaccagtcccataacgatcaccgccacgaccatcaatattaagctaatgattaataagctgttggtgtagggcaggtcctctttcagacgcatcgctttttcattgcgtaaccagcgcaagtagccatacatcgctaacccgccggaaaacagacacaacaacaacgccagcagttcgcgaatgacgggcgtggcgaaatctggcgcaagttgatcaagcccaacccccgccgccagaaatcctagtgcagtacggatccacgccagaaaagtacgctcattagccaggctgaagcggtaatcaggcgcttctccgaggcgggaaattttcattgttgctcctttgcaatttcactaacgctctacctttagcggtttttttaagaatttcgtccgcccgtttcctgatatgcttttgccatccgctacaaggaggtcagatgggtatcatagctcaaaataaaatcagtagtttgggcatgctgttcggtgccatcgctttaatgatggggattatccactttagtttcggccctttctccgcaccaccgccaacgtttgaaagcatcgtggcggacaaaacggctgaaattaaaagaggtcttctcgccggaataaaaggcgaaaaaattaccaccgtggagaaaaaagaggacgtagatgtcgataaaatcctcaatcaaagcggtatcgcactggccattgctgcgctactttgcgcatttattggcggtatgcgtaaggaaaatcgctggggcattcgcggcgcgctggtttttggcggcgggacgctggctttccataccttgctttttggtatcggcatcgtgtgcagcattttgctgatattccttatcttttccttcctgaccggcggtagtctggtttaagcagcctgaataatgcccgccgggtgatcatcagcgggcattatcgtcagaacttctgttttttctcctccaccttcaccccttgtgtcggtaggccggtgtcatagtcgcgtacaactgggctatagccatcttgtggacgtggacgaaacgccccatccagcgcggccgtgcatctttacgccacggacgcagactccattggtaactgcggaacggatcgcgaattttgtccatgtaatccaataaggcgtcatgcattttgctgcgaacgtctgcaaaacggatatcatcgatcaggttatgcatttcatttgggtcattacggcgatcgtaaagttcatcactggtgaagaggttgagtaccagtttaaagtcatccgtcacccagcaacgcaccggaataaaaccgccaaagctgtcatgctcaatctcgtagcggttaaattccaccatcacgccgcgtggctctttcacggcaaggatattttcccccggcagaatctctggtttttcaatatctgccagcgccatcattgtcggcagtaaatcgatatgactgactggcgtatcgacctgtcgccgctccccttgcgggctacggatgatcagcggaatgcgggtgatgtcgtcatacatcgccgcccctttactgatcagcttatgtgcgcccatcatttcgccgtgatcggaggtataaataacccacgtattttcacgttgctctggcgttaaggcattgatgacccgtccgatttggtcatcaacaaagtcattacaggcaaaatagagcggatggtgataaagcccgtcatcaccgactgggcttggcatcgcctgcgcccataagcggtgatgttccggtttgttagccaggtcatcctgtgctttctcgcccagctcgtagtaaaaatcagcgtatttctctaaatactccaccggacaggtgaacgggtgatgcggctcatcatagctaaccaccatcaggaaaggctcgtctgcgcgcgcaggctgttgcagaaaatccaccgcccgattgctgatacgatgcgcccaggtgaaggtttcgtcgatatggttcgcctgtaaatcttcgacgctgtttaggccattgcgccacaggctaatctctttttccgtcagttcgctaagatagttcgccccatcgaaccagtaatcagcgtcccactccggcggacactcgccagtgccgaaatagtcatgaccgtcgagatgccatttgccgatgtaacaggtgtgatagccggcatccttaaagtagcgccccatagtggagatgtttttgcctggcgcgacgttgttggtccacgggccggactggttagcgtagataccggtaaatagtccggcccgtgcaggcgtacaaaccggactacaggtgtaggcggaattaaagcgaataccttccgccgccagactatcaatattttgcgtattcagcggtttaccgctatagcaaccgaccatattggtggcctgggtatcggtcatgacgaacagaaaattggggcgtttcataggctatccttcccgtcgggagtaaaggttacggctgggtcgtgacgatgccgccagctgtcaaaaatcaggtagacaatcactacggcggcaatgaaataactgatcatcgctaaccagcgcgtaccgtagccgccgaattcagccagcccggcatagacgccaatcatcgcgaacaggatgccaatactcgcgatcttgacgtttttccacggtttcatgtccaccgcaaacgcatctttgaaggtgaacggcgtggcgcgcggtttgataaaaccgatcaccagcatcacgaccacgttgatgcagaacgtacaggccagcacatagaggaaatggaagtcgaacttcaccagatagttgatggtgatgtagctgattatgccaatccccatcgctacttttgccgccagcgccgggatgcgcgggaagaaaaagcccataatgatgatggtaaccagcggcacgttgtaaatgccgttgagctgtttcatccagctatacagcccctgcggcgcgttggcgatccacggcgcgaccagcacgctaacgatagcgataaagaaaccaaatttgcgcccgacggtgaccagctgctgcggctcggcattctggttaatgatgcgacggtaaatacccatactgaataacgtactggcgctattcagaaagccgttgaaggtactgatcaccgcaccaaataacaccgcgccgaagaaacccaccattggcactggcagaacgttattgaccagcgtcgggtaggccatgtcggctttcggtaaatcctgatacagatgaaacgcaatcaaccctggcagcaccagtaccagcgggtcgagcattttcagcaccgccgttaacagcgcccccttttgcccttccgccaggcttttactcgccagcgtgcgttgcacgatgccctgatttgtacaccagtaaaaggtgttcaccagaatcaaaccggtaaatgccgcgccaatcggcaagggatcggtcgggccaccgatactgtttaatttctcggcgtgaacggtggtgagttgctcaatgccctgcataaagctgcccttgcccatcgcgattaggccaaataccggcaccatcaacccgccgataaccagcccaataccgttgatggagtccgccactgccattgcgcgcagtccgccgatcaccgcatacaaaattcccgccagaccaagcaaaattaccagtagccagatagccgcaccgtgagaaatctgtaggctttccccgacgtgaaacaggctgttgagcgccaacgcgccggagtagagaacaatcggcagaaagcagacgccggtggcaattaggaagcagaagtcgatgataatacgcgtcgttttatcataacgttcctccagaaaatcggggatggtggcaatgccgcgcttcagatagcgcggtaaaaagattagcgcgaggaagatcagcgtcaccgcactagtcacttcccagcccatcacgctcatgccgcttttgtaggcctgcccggaaaggccgaccagttgttccgtggaaaggttggttagcattaagctagcggcaataaccggcgcttttagactacgtccggcaagaaaatagccttgttggcttccggtatctgttttgcggaccttccaccaggtgatcaccgccaccagcagcgtaaaaccgacaaaactcaagatttgtaagctattcatctcatagcccttatttatgtttatgtcccggacgcatgaatatagggagaggtaaaatgcgtcgggtcaggcagtcagattcttaaaatacaaacgtcgtatccctgaacggattgttttctgttaagttcaggttgtgagcataattcgccggagggatattaaaatgaatggaaaattgcaaagtagtgatgtaaaaaacgaaactccgtacaatattcccttattgattaacgaaaatgtgatctccagcggaatttctctgatcagcctctggcatacctacgccgacgagcattaccgggtgatctggccgcgggacaagaagaaaccgcttatcgccaacagttgggttgcggtgtataccgtacaaggatgtgggaaaattcttttaaagaatggcgaacaaataacactgcatggcaactgtattatattcttaaagccaatggatattcactcttatcactgtgaaggtttagtctgggaacagtactggatggaatttacccccaccagtatgatggatattcccgttggtcagcaaagcgttatttataatggcgaaatttataatcaggaactcaccgaagttgctgagttaataactagtccagaagcaataaaaaataatctggcagtcgcttttctgacgaaaattatttatcagtggatttgtcttatgtacgcagatggtaaaaaagatccacaacggcggcaaattgaaaaattaattgccactttacatgccagtctgcaacaacgctggagcgtagctgatatggctgccacgatcccctgtagcgaagcctggttgcgtcgtctgtttttacgctataccggcaagacgccgaaagaatattacctcgatgcgcgtctggatctggcgctaagcctattaaagcaacaaggaaacagcgttggcgaagtcgctgatacgctcaacttcttcgactcctttcatttcagcaaagcctttaaacataaatttggttatgcgccgagtgccgtgctaaagaatacggaccagcacccaacggatgccagtccacacaattaacgtaactctggccagtacgctttgttggcctccagcaactcatccagaatagctttggcgacgctggcgctcggtaccgttttgctcaacgtaatcgcctgccacaggtgctgataactacgctgttcccaggcgtccacgaccagtttttccaccgccacttgctgactcattaaccctttctgaaactgcgggatatcgcgctccaccagtggttcaggccgtagtagcgcacgcgcatctgtttgcgatcttgcagcccaacaatttgcgccatccggctttcaataccgattggcatgtcacagatgttgaggattttcgcattcgggcgcagacgacgcgtggcttctgcgacaatggctgccgggttggagtagttgagcatccaggcatttggactatatttttccatataatccaccagttccaggacgccgccaatggaacgcatgccgtacgctattccgccgggtccgcaagtttcctgaccaacaacgccgtggcgcagcgggattttttcatccagttcgcgcatcgggtatttgccgacgcggatgtgcgccatgacaaaatcaacgtcgctgaatgccacttcaggatcggtggtgtaactaaacgcaatgtccggcgctttttctttaaggatgactttacaggcttcggcaatcacttcctgccgcgcaccatcgttatcataaaatttcagtgcacgaagcgggaaacggtcctgattcgccaggagcatcaacacgatgcctggcgtaaaggtgcttccaccgcctgcgacaaccacactgaatttggtcattatactgcctccgtaatggcaacattttctgcactttgatgagaattaattaagctatcgagctgttcacgcagctgagatacatgcagaccaatgatcacctgaatggcatcgccactacggaagacgccgtgcgctcccagctttttaaagacttcgtcatccagcgtttgactcatgtcatgcagtgcaatacgtaaacgcgtcgcgcaattgttaatgctggagatattgccgaccccgcccagggcttgcaggataccggcagcctgatccagctcttttttttggctctgccgcggtggtttggcctcggctggctttgtattcggctttactgtagagtttcacttccgcatcttcacgtcccggcgtgcacatgttgaactgcagaatcagtgtgcggaaaaccacgaagtacagcagggtaaagcacaacccaatggcgatttgggtcagcatcatatccgcgtggttgctgaacatcgggatccagttttgcggtaaaacttagtcaatcagacctccgcccatgttgcccaccacaccaaagagatacattacggtgctcatactggccgccagcacggcgtgtaccgcaaacagcaacggactaatgaacaggaaggtaaattccagcggttcggtaattcccaccagcatggcggttaaggttgcgggaatcagcaagcccgccacttttacccgattttccggtgcggcagtgaagtacatcgctaaagaaatgcccacggcaccaaagattttactgttaccgtgcagggcaaaaccgccttccgggaacaagcttttcagcggctcggcgctcaaactgaactcttgcagatgctgcgcccagtacatctgaatgccgccttcaacagctgccggaccaaagataaactgtccgtagatgaagtggtgtaaaccggttgggatcagaatacgttcgaggaaggtgtaaacccagaccccaagtgcacccgcgctacgcaggaacgcttgcagagattcaatccccatttgtacttttggccagccgagcaacgtcagccaggcacaggggatcatcaccaggaaggcgataatcaccacataagacgtcccctggaaaatgccgagaaaaaccggcagttttttatcgaacagacggttatgcagcgccgtcacaatgccggaaatgataattgcgccgataatgctggtatcgagggttttaatcccggccatcattgtcagaccgctacctgccaccgcgtcctgagtgaaatcgacgccgaagtagcttccccaggccattcccatcgcgttgatgaaatagttccaggtcaggaaactcaccatcaccgccagacaagcacgcccctgcgcttgcttagcaaggccaatgggtaaaccgacagcaaaaatcagcggcatattacggaataccgtccaaccgccctcttcaataatgtgtacgatttgcgcgaataaactgttcggatcggtcagactttccccgacaaacatcgggttttgcagcaagatggcaagacccaccacaatcccggcgaagggaaacagcagcactggcgtgaacatcgcgccgccaaagcgttgaatttgactgagcatttccacatcctcttttctcaattctgtaagtaggaagcctgattggttatgcggcaggcctggagcgaggataggaagatgcgatcggcagaacatgacgacccaatgggattcgtgatcgctttcatgcttttcgttgggcggtagagatctacgttttcgcgaaaaagtagacctctgtgagcacaggtacacagcatcgaacacatctttaaaaaaaagatgttttttcaatcgattaagcagaacttgtgtgcgcattacccgggcttgcaggcaaaaaagagatctagagatgatctacaaaagcattgcggagcggttaagaattcgacttaactccgcagatttcacgctaaacagccttcttcccggtgaaaaaaagctggcggaagagtttgcggtaagccggatgaccatccgtaaagccattgacctgctggtagcgtgggggctggtggtccgccgccacggtagtggcacttacctggtgcgcaaagatgtactgcatcaaaccgccagtctgaccgggctggtggaggtgttaaaacggcagggaaaaacggtcaccagccaggtgctgatttttgaaatcatgcctgcgcctccggccattgccagccagttacggattcaaatcaacgagcagatctacttctcccgtcgcgttcgttttgtggaagggaaaccgctgatgctggaagacagctatatgccggtaaaactgttccgtaatcttagcctgcaacatctggaagggagcaagtttgaatatattgaacaagagtgcgggattttgattggcggtaattatgaaagcctgacgccagtgctcgccgatagactgctggcgcggcaaatgaaggtagcggaacacacgccactgctgcggatcaccagcttgagttatagcgagagcggggagtttttgaattatagtgtgatgttcagaaatgccagcgaataccaggtggagtaccatttacggcgactccacccggaaaagagttaaccgatactccagaagagcaccgccagtaattggggggtgataatgcgcaggaacattaccaacggatagacagtggcgtaagagagcgccgccgcaccgctggttggatgaagattattagcaaacgccagcgccggaggatcggtcatggaacctgccagcatcccgcacatggtcaggtaattcattttggctaacatccgcgccagaatgccaacagtaatcagcggaacggcggtgatcagggcaccataaccaatccagcttagcccttcgccattgaccagggtattcacaaaatccccaccagatttcagaccaacgacgctgaggaacagcacgatccccagctcccgcagcgcgaggttggcgcttggcggcataaaccagtacagcttgccgatactgccgatacgcccgaggatcaacgccataatcagcggtccgcccgccagccccagtttcaacgcggccgggaatcctggcacaaagacgggaatagaacctaacaatacgcctagcccgatgccaataaacactggcagcatctgaacctgttgcagtttttgctgcgcattccccagcacattggcaacggcatcaattgcggacggacgccccaccagattgaggatatcgccgaactgcaggctgatatcgccactggcgaccagttcgaccccggcacggttcaggcggctgataacaacgtcatagcgttctttaaagtgcaggtcgcgaatacgttttccgagcacgttttcattggtgaccaccacacgctcgacgcgcaaatcagtgcctttcgtggacaggctagtatcgacctcctgaccaatcaccagttgcgcattatgtaaatccgctggctgacccaccagatgcagcaaatcgcccagttggataatggtatctgggctaggaacttttagggtttcttcgcgtttcagacggctgcagataattttgtcgccgttgagaatcggtacatctttaatggctaaatcatgcaggttagggttctcaacgcgaatattgatagtcttgatcagcgcgccgccattggtgcgactagactcgtgctgctgagcttctgtctcgacattgacgcggaaaataacccgcaacatccacatggtgaacaaaatcccgcaaatgccgaatggatacgccatcgcgtaactcatccccatctgatcgaccatttccattggtgtacccaggtcgcgcaaaatctgctgccctgcccccagcgctggcgtattggtaaccgcaccggagaaaatccccagcactaccggcagtggaatatcaaacagtttatgcaggatggcggtaaccagaccaccgatgatgacgatcagaacagcaaacaggttgaggcgtaatccggagacgcgcaaactggcaaagaagcccggccctacctgaatcccgatagtataaacgaacaggatcaggccaaattcctgaataacatgcagcatatcgctacttaatgtcatccccgcctgagaaacaaaatggccgacgatgatcccaccaaacagcacgccgccaatacctaatcctatgccgcgaaatttgacgttgccgataaacaaaccgacgactgccaccaaagccagaatactgaccgttaatgctatatcactcatcgtccatttctcttgagataacattttaattgctacggattatggctgaatcggtgaagcagatttgccttatagcgcacattatcacgggaaagaacgtgccgaaatatcttaaacagtcgaaatttaacgcattgttgagtaagtaagacaaaaaaagccccaccagaatggcggggcaaagagaatagctagttagctatttaacgcgggacgttcgctgatagcgatacgctgcgctgcgatgggttcaggctcattacgaattaaatcaatatgcagtaaaccgtttacgaaggttgcgccagagacttccatattttcagccagcgtaaagctcaggctaaatggctgattcataagcccttgatgcagccattttttctcttcttttggctgctccggcgtgccttttacgctcaggcgcgtaccttccagttgaatctctaaatcttcctgacggaaacctgccagcgcaagggtaatgcggtagtggttatcgtcgcttttctcaatgttgtacggcgggaagctctggctttcaccggcgttttgcagtgcgttggccagtttgtcaaaaccgatccattgacgcatcagtggggataaatcgaagttacgcatagtcatttctccttctaagaagcgagtaagtacctgcaaatccgaagattcgcatatgctccctgacggcgagcatggagatgtcaggccgcgccaggcggccttagggaattagttgatttcgatacggcgcggttttttcgcttccggaatcacgcgttcgagatcgatatacagcaaaccatttaccaggttagcaccacgaacatgaatgttctcagctaactggaatttgcgttcaaagttgcgttcagcgatgccctggtacagataggtgcgctctttttgttcgtcggcgtgagcacctttcaccaccagcagattatcctgggcggtaatttccagttcgctctcagcaaaaccagccacagcgatagcaatgcggtaatggttttcgtctaccagttcaacgttatacggagggtagccgccattactctggctctggttgttttctaagtggttaaacaaacggtcaaatccaatagcagaacggtaaagcggggataaatcaaagttacgcataatcaatagctcctgaaatcagcgagaatgtaagaccttccacaatggacaggtcaggtagccagaacacccatcaggcgcgtcctcatcggctacgatgtaaaaatgggtctggaaatgaacttttcaagccttatcagcggacttttttttgcagtttatggtctattgcatagactgagggggcagcacgaaacgttaaagtgcgatagccgccacagtgcgacgtaatgatgatgttattttcagcaagggatcgctataactcatcaggccaacacccacgatcaacagatgaatttattatgataagaaatgtgttgttagcgttcatgatatgcagcggaatgacattactcggaggatgctccagcgtgatgtcccataccggagggaaagaaggaacgtatcccggcacccgcgccagcgcaaccatgattggcgacgatgaaaccaactggggcactaagagcctggcgattctcgatatgccgtttaccgctgtgatggacacgcttttactgccgtgggatgtgttccgcaaagacagcagcgtgcgcagccgcgttgaaaaaagcgaagccaacgcgcaagccaccaatgcggttattccaccggccagaatgcctgataactgatttagcgatcagtttcggtgatccacagctggccgccttccatccacgccagccactgaccatccgggctgaagaccacggcgtccgcagaaggactattggcgtggtgttcggttaaatactcaacctcgccgctttgcgcatgggcacaagcaattcgattatccagcacaaagcccaaccattctccactcggatgccagttaaatgcagactgaatatccgttttgttatgggttaactggcgcggctcgccgccctgtgggctgataagccacagttgcacaatgccgttatcatctcgcattaaaaacgcgatttgtgtaccctgcggattacagcgcacccagtggcgcgggacgttgactaaccccggataagcccgatggtgggtaaaggttaaacgtcgctgcacgacgccacgcggtggcgcgggcagggttgtttccgttccgcttaacggcgcatcacctgccgctttccagccagcttcatcttgcggtaactcaacgataaacagctccggcactttctcgccctttgggctaagtgtgtcgccaataaatgccagcgcgtgatttcctacccatccttcttcataagcacgattgatttcatcactgccaggctgtggcgtgggcgtggttttgctcaccagcacgcaccagtggctaccgctgtattcacgcggatgctgcttttgtacgttgaccgggccaaacggcgcagcaacaccgacgtttcgcaaatccagcgccggatcgagttcatgcattacatggtcgttataggtaaagctcaccctttcaccgttcgggctaaagacatgcacatggctgccgccgcgcagcactcctggcgtatacggcgcggtaatatccatcgcatcaaggttactcatcttgccgccttcaacaatcactccgcgccgatgatggaagtcgtaatgccatgtttcatcaggattttccgggccgtggatgaaaacatatttctcactcttcggatgaacggtcaccacgccgacgtgtgcgccctgactcgcgcgatagataacctcgacctcgccggtatggatattcacacgctcaatggtctcgccggtaaagctcgcgccagaaggacgcacgtcaaataccagccactggctgtcgggcgtccaggtattggtattggtgagcaggtgattacggggagcaaaggttatctgtttcatggcgcggtcctgatacaaaacgggtcccgccatcatacttcacaaggacttcactttcagacaatagtcttttgccatcgtgatgaatgtgagtgaaaagatggaacatttcgacgtggcgattattggcctcggcccggcaggaagcgcgttggcacgaaagttagcaggcaaaatgcaggtgatcgcgctggataaaaagcaccagtgtggtactgaaggtttcagcaaaccctgcggcggtctgctggcaccggacgcgcagcgatcttttattcgcgatgggctgacgcttcctgtcgatgtgatcgctaatccgcagattttcagcgtcaaaaccgtcgacgtcgccgcaagcctcacgcgtaactaccagcgaagctatatcaatattaatcgccatgctttcgacttgtggatgaaaagcctgatccccgccagcgttgaggtttatcacgacagcctgtgccgaaaaatctggcgtgaggatgataaatggcatgtcatttttcgtgcagacggctgggagcaacatattaccgcccgctatctggtcggtgccgatggcgcaaacagcatggtgcggcgacatctctacccggatcatcaaatccgtaaatatgtcgctatccagcagtggttcgcggagaaacatccggtgccgttctactcctgcatctttgataatagcataactaactgttatagttggagtatcagcaaagacggttattttatctttggcggtgcctatccaatgaaagacggtcagacgcgtttcacgacgctgaaagagaaaatgagcgcctttcagttccagtttggtaagacggtgaaaagcgaaaaatgcacggtgctgtttcccagccgctggcaggattttgtctgcggtaaggacaacgcctttctgattggtgaagcggcgggatttatcagcgccagcagcctggaggggattagctatgcgctggatagcacagacattctgcgtagcgtgttactgaagcagccagagaagctcaataccgcttactggcgcgccacccgcaaactgcgtttaaaactcttcggcaagatagtaaaaagccgatgcctgaccgcaccggctttaagaaagtggattatgcgcagtggtgtggcacatattccacagttgaaggattaaccaacgcgcttcacatcgcccaccagcaggatataagagagcgcgccaatcaacgcgacggcggagatataaaccagtgcaggtgcgaaaccgtaaccctgcgccaggtaccccaccaccagcggaacggtgatgccgcccagaccaccggcgaagttaaacacgccgccggttaaaccaatcaggcgcatcggtgccagagaagaaaccaggctccaggtaatgctagcaaaaccgttaccgaagaatgccagcgccatcaggcacataatcatcatcggatcgttagtgtagttagcgcccataatgcaggtggagatcagcaagccgcagataatcggcgttttacgcgcaaagcccagactaaagcccttacgtaccagcagatccgctacccagccagagagcaggacgccgacaaacgccgcgaggaatggcaccgtggtcataaagcctgctttcagcgccgtgattcctttttcctgggttaaatagttcgggaaccaggttaagaaaaaccacagtgtagaagccaccgcaaattgcccaagataaacgccgatcagtttacgatggaacaccagtttccagtctttggctgttaacggctgacgcgcctctttcttcaccggcgcatcaccatccaccagaccgccgccatcacgaatgtaatccagttcagctttgctgatacctttggtcaggcgcggcggctgataaaccttaaaccaaatcaggctccagataatgccgataccaccagtgacaatgaacacccagtgccagctcaacatctcctgaatccagatcagcagcggcgtcagaaacgccagaccgacaaactgaccagacgtataaaaaccaacggcagaagcgcgttcatgttccgggaaccagctggtcaccatccggttattggtcgggaaagcaggcgcttcgaaaataccggttatcgcgcgcagaccaattaaactcattaagcccgtggcaaagccctggaataaagtcgccacactccagccaaatatcgcaataaaataagtcacgcgagaacctacgcgatctaaaaaccaaccgccggggatctgacatagcgtataaagccaggcgaaggcgctaaatacatagcccatttccgctttggtaatgccgaactcttcctgaatatgggcggaagccacggccaggttggcgcggtcgacataacaaatgactaccgtaataaagatcatcaccagcgtcagataacgccgacgccccggctttgctgcattaacgggaatatccatagcgagctttctccagattttgggcatagcgaagccgctcaccatgccctgtaatttacagagggttatatttttgtattgctgttttagtgcccgatgaggggcttacgtggcaggaattaccactctgctacgctgttatcttcatgacgccagagcggattacgccagtccggggcatttttactgaactcaatcactttagcttcgtcgatttccacgcctaagcccggtttcgttaacggtttaaagaagccgccgaccatgctgaagtcttctttgtttttcacaaagtcgagtaactccgcgcctttgttgtaatgaattcccatactttgttcctgaagtacggcgttataggaaacaaagtcgatatgcaggcaagccgccagtgcaatcggtccgagcggacagtgcggcgcaagggtcacgtcataggcttctgccattccggcgattttgtagcattcggtaataccgcccgcgtgggagagatccggttgcagaatgctaataccacctgcctccagcacgcgtttaaaatcgaagcgactgaacatgcgttcacccgccgccagtggaatatgcgtttgtgccgccagtttcgggtagtattcggcttgttccgccagcaccggctcctcaataaacagcgggcgatacggctccagttctttaatcagcactttcgccatcggcgcgctgacgcgaccgtggaaatcaagaccaaactcaatctgattgccaaaagcttcacgaatttgtgccacggtgttaaccgccgcatctaccgcgcgggagttatcaattagccccagttcttcacaaccgttcagtttgaaggtatcgaagccgatttcgcgtagcgttttaatgccgtcgataacatccgccggacgatcgccgccaacccaactgtaggctttaattttgtcgcgaaccaggccgcccatcagttgccagaccggcgcattcagcactttacctttgatatcccataacgcctggtcaatcccggcgatggcgctcatcaggatcggaccgccgcgatagaatccggcgcgatacatcacttgccataagtcattgatgcggcttggatcctgaccaatcaaatagtcacccagctcgtgaactgccgcttccaccgtacgggcgcggccttcgatcacgggctcgccccaaccgaccacgccttcatcggtttcaattttcaggaacatccagcggggaggtaaacgatacgtggtaattttggtgattttcattgcactgcctctcgatacgccttaacaaatgctgctgcctgctgcgcggtgcgctctacggattgcccggcgcgatagagatcgctgcctaagcccgcccctgcacaacctgcgtctatccactgcgccaggttttctggcgtcacgccgccaacggcaaagactgcgatgtcgcttggcaataccgcttttaacgctttgatgtattgcggaccaaaagcgctactcggaaatattttcagcgcctgcgcgcccgcttcgagcgcggtaaaggcttcggtcgccgtcgcgcagccggggcagacggtcatgccgtagcccaccgcacggcggatcacttcactatggatattgggcgtaacgatgagctgacagcccatcctggcgagcgcatcgacctgttcaggtttcagtaccgtacctgcgccaatcaacgccttgtcgccgtacgcatcaacgatggcgggaatgctttgctcccattgtggggaattcagcgggatttcaaccgcgtcgaacccggcgtcaatcaccgcgccaacatgcgccagcgcctcgtcgggcgtaataccgcgcaaaatggcgatcagcgggagtttagtttgccactgcatgagcgatgctccttataccagcctgaaatgccgtgtcgcccgccaccgccgtcacgtcgcaacccatcgcctgaaaggcttgctggtagcgcgcggtcaggcttgttccggcgacaagggtgatggcgtgttgatgggccacatagtcgcgcatactggcgacctctgcgccaatcaacaaaccagagagaaattcgctgacctgttcgcggggaagtgttcccagcacatggctggcgcgaacttcaaaaagctgcggcaatatggcgggcgtattaagaccacgctcaaggccagctgtgaaggcatcggcagagttttcctgcggcggcaaacctgcgccaatcaaactgtgatttaacagtaaatgatgtaattcaccggtcatcacggtgcgaaaatcgttgatttgctggctatcggcctgcacccatttgcaatgggttccgggcatgacataaagagaggaaggagccagagctcgcgcgccgatcaattgtgtttcttcgccgcgcatcacattgtggttatcgtcatgagagacacataatccgggaataatccagatattgtcgccaacactcgttaattgttcgccaatagagctaaaacaggcaggaacagataaatacggtgcaactttccagccgacgttgctgccaaccattcctgccattaccactggcgttttctcttcacgccagtcggtcgtgacttctgctaacaccgcagccggagattttccgttcaggcgcgtgacgcctgcttcactttgcctgctctccaggcagtggtcgccctgataaagccaggcgcgcagattggtgcttccccagtcaattgcgatgtagcgagctgtcatgtgatttcctttaaccttcgtgtgctgctggcgatcatggtaagcgccgcctgctctgccgcatcgccgtcctgatgtcgtatcgcatcgaacagcgccttatgttcctggagcgtttgcggcatgttggcctcatcgcccatccaggttcgttcaaaaaccgcccgctgcaggctactgatcgcaatgctaagttgctgtaacaccgggttatgcacgctctgcagcaccgcctcgtggtagcgaatatccgcttcgttaaacgcttcgcggtcctgattgttggcaatcatctcgttcagcgcgctttcaatctgcgccagatcgctggaagtcgcgcgctctgctgcccaacgggcaatcgccggttccaccagatttcgcacttcgctcatggcactgataagccgtgggtcgtagtcattttccagcacccattgcagtacgtcagtgtcgaggtaattccactggttacgcggtgccacaaacgccccgcgataacgtttcatttcaatcagccgcttcgccatcaggctacggaacacctcacggatgatgttgcggctggttgcaaactcctcacagagttccgcctcagccggaagcgggctgcctggcacgtatttgccgtgaacgatctgtttacccagcgtaatgacaatgcgatcggttttattgagagtcatggagagtccttgtgctctgtatgttcttctctactttaccccgatcgatgcataacgcggcaactttgtagtaccagcgtgatgacgttcgcgtttgccgtgcgtgtaatgtagtacaaacttatattgttgtactacaatttagatcacaaaaagaacaatgcataaaaaaatgacatgcgtcgggcagaaatctgaaaagggatatcaggcgctaaacaggagggaaagaagagtatgctttcaacggcttagctactcgtttaaaggattaatcatgaagttgaattttaagggattttttaaggctgccggtttattcccactggcgctgatgcttagtggctgtatcagctatgctctggtttcccataccgcaaagggtagtagtggaaagtatcaaagccagagtgacaccatcactgggctaagccaggcaaaagatagtaatggaacaaaaggctatgtttttgtaggggaaagcctggattaccttatcactgatggtgccgatgacatcgttaagatgctcaatgatccagcacttaaccggcacaatattcaggttgccgatgacgcaagatttgttttaaatgcggggaaaaagaaatttaccggcacaataagcctttactactactggaataacgaagaagaaaaggcactggcaacgcattatggttttgcctgtggtgttcaacactgtaccaggagtctggaaaacctaaaaggcacaatccatgagaaaaataaaaacatggattacagtaaggtgatggcgttctaccatccatttaaagtgcgattttatgaatactatagtcccagaggcattccggatggtgtttccgcagcattactgccagtgactgttacgctggacatcattactgcaccgctgcaatttctggttgtatatgcagtaaaccaataatcagtaagcgggcaaacgcgtttatgctgtttgcccgcccacagattaattcagcacatacttctcaatagcaaacgccacgccatcttcaaggttagatttggtgacaaagttcgccacttctttcacactaggaatagcgttatccatcgccacaccgacgcctgcatattcaatcattgcgatatcgttttcctgatcgccaatcgccatgatttcttccggtttaatacctaacacgtcggccagacttttcacccccgtacctttgttaacgcgtttatcgaggatttcgaggaagtacggcgcacttttcagcacggtatatttctctttcacttcctgcggaatacgcgcgatagcctggtcgaggatggcgggttcatcaatcatcatcactttcaggaactgggtattggggtccattttctccgcttcgcagaacaccagcggaatggtggcaacgaaggattcatgcaccgtgtagtagctgatatcacggttggcggtgtacagcgtggtgcggtccagggcgtggaaatgagaaccgacttcgcgagagagtttttccaggaaacgatagtcgtcatagctgagagcagtttgcgccacggtgctaccatcagcggccttctgtaccagcgcgccgttataagtaatgcagtagtcgcccggctgttccatatgcagctctttcaggtagttgtgcacacctgcatacgggcgacccgtcgttagcacgacattcacgccacgggcgcgagctgcggcaatcgcatttttaacggcgggactaatggtgtgatcgggcagcagaagggtgccatccatatcgatagcaatgagtttaatagccatgagttccccaggtagattggttcctgacccatgctaacgcgattccgctcaaaaatcagtacaacacccgagggaaaagggggatgcaacgcgcgttgcgtgctccctttttgcttagcggaagagtttccctttcagcagttccatgcctgcggaaagcagatcgttattggcttgtggactcacttcaccttgcggactgagcgcatcaataatcttcggcaattgttctgccagtaaactggaagctgtactggtatccacgccaagtttttgcccgagatcggacaccgcatttgtgccgagcgcgctttccagttgctcgccactaacgctttgattgccctgttgattactcagccaggtactgagaatggcccctaagccgccactttgcagtttttccagcagcacctgaatgccgccctgctcctcaacccaacttaaaatagcctgatatttccccgcatcgcctttcagaaaggcaccgacaacttcatcaaaaagccccatgataatcacctgtaaagcgttacgtgttgacccaaaaagtatagatttgcgggatgataattgcggattgcagaaataaaaagggcggagatgatctccgcccttttcttatagcttcttgccggatgcggcgtgaacgccttatccggcctacaaaatcatgaaaattcaatacattgcaagattttcgtaggcctgataagcgtagcgcatcaggcacgctcgcatggttagcgccattaaatatcgatattcgccgctttcagggcgttctcttcaataaacgcacggcgcggttcaacggcgtcgcccatcagcgtggtgaacaactggtcggcagcaatcgcatctttaacggtaacgcgcagcatacgacgactttccgggtccatagtggtttcccacagctgttccgggttcatctcgcccagacctttataacgctggatggagaggccgcgacgggactctttcaccagccagtccagcgcctgctcgaagctggctaccggctgacgacgctcgccacgttcgataaacgcatcttcttccagcaagccacgcagtttctcacccagcgtgcagatacgacgatattcgccaccggtgataaactcgtgatccagcggatagtcagtatccacaccgtgggtacgcacgcgaacaatcggctcgaacaggttttgctcagcattggtgtgaacatcaaacttccactggctgccgtgctgttctttgtcgttcagttcgctgaccagcgcgttcacccagcgggtaacggtctgctcatcagaaaggtcagcttccgtcaacgtcggctgatagataagctctttcagcattgctttcggataacgacgctccatacgattgatcattttctgcgtcgcgttgtactcagataccagtttctctaacgcttcgccagccaatgccggtgcactggcgttggtgtgcagcgttgcgccgtccagcgcgatagagatctggtactgatccatcgcttcgtcgtctttaatgtactgttcctgcttgcctttcttcactttgtacagcggcggctgagcgatgtagacgtgaccgcgttcaacgatttccggcatctgacgatagaagaaggtcaacagcagcgtacgaatgtggctgccgtcgacgtccgcatcggtcatgatgatgatgctgtgataacgcagtttgtccgggttgtactcgtcacgaccgataccacagccaagcgcggtgataagcgtcgccacttcctgagaagagagcatcttatcgaagcgcgctttctcgacgttgaggattttacccttcagcggcagaatcgcctggttcttgcggttacgcccctgcttcgcagagccgcccgcggagtccccttccaccaggtacagttcggaaagcgccggatcgcgttcctggcagtctgccagtttgcccggcaggcccgctaagtcgagcgcacctttacggcgggtcatttcacgcgcgcgacgcgccgcttcacgggcacgggcagcatcgataattttgccaaccacgattttcgcgtcggttgggttttccagcaggtattctgccagcagttcgttcatctgctgttcaaccgcgcttttcacctcagaagaaaccagtttgtctttggtctgggaggagaatttcgggtccggcactttcacggaaacgaccgcaatcaggccttcacgcgcatcgtcaccggtggcgctgactttggcttttttgctgtagccttctttgtccatgtaggcgttcagggtacgggtcatcgccgcacggaagcctgccaggtgagtaccgccgtcacgctgcggaatgttgttggtaaagcagtagatgttttcctggaagccatcgttccactgcaacgccacttcgacgccaataccgtctttttcagtggagaagtagaagatattcgggtggatcggcgttttgttcttgttcagatattcaacgaacgccttgatgccgccttcatagtggaagtggtcttctttgccgtcgcgcttgtcgcgcagacgaatggaaacgccggagttgaggaagctcaactcacgcagacgtttcgccagaatttcatattcgaactcggtcacattggtgaaggtttcgaggctgggccagaaacgcaccatggtgccggttttttcagtctcgccggtaaccgccagcggggcctgcggtacaccgtgttcgtagatctgacggtgaattttaccctcgcgctggataaccagctccagtttttggctcagggcgtttactacgctaacaccaacgccgtgcagaccgccggacactttataggagttatcgtcaaatttaccgcctgcgtgcagaacggtcatgatcacttccgccgcgcttacgccctcttccgggtgaataccggtcggaatgccgcgcccgtcatcctgtacagagacagagttatcggcgtgaatggtgacgataatttctttacagtgacccgcgagcgcttcgtcgatagcgttatctaccacctcgaataccatgtggtgcagaccggtgccgtcatccgtgtcgccgatatacatacccgggcgcttacgcaccgcatccagccctttcaggactttgatactggaggagtcataagaattgctcatcaacgtttctcgctcatttatacttgggttaatccgttattttacccttttccacggtaaacatcttgctattttcgtcgctcatgtctataacgtgttcagcactgatcgcgctgacaaagacctgactttgcgtcgcttttaagcggctggcaagcagcccgcgacgctcatcatcaagctcagaggcaaaatcatctatcaggtagagacaccgccgcccgctttcacgggtgaggaactctccttgcgccagacgtaaggcgcacatcaacagcttaagctgcccacggcttaaggtatcttccaccggcgcaccgtcggcgcgaatgcgtaagtccgctttgtgcgggccgtgcgcggtgtaggttagctggcgatcgcgttcaaaattacgttccagcacctcagcatattctgtctctttctcccagccgcgctggaaagagaaagtcagagaaaactcagggagaaattgcttacaggtatcagccatatcggccgcgataccggcgctatactccgcgcgccaggtgctgatttgctccgccagcgggatcagctctttatcccacgggcgtagctgttcgtaacgtgtcacctggcgcagcgccgcattgcgctgcttgagcaatcgcttgagattgctccaggcggtgaaaaatccgggttcgttgtgaaagcatccccagtcgaggaatgctcttctgtatttggggccgccgttgagtaaagtaaacccttctggcgttatcaactgcattggcatcaggtgcgccagttccgcgaccttatgcccgtctgtaccgtcgatgcggactttgctgtcgccctgtttgtctttggttaagccaatcgctgtctcgcgctcttcgccctgtaatcgcccgtggagaacaaacgcctcctgctcatggcgaatgacgcgaccaatctgcaaactgcgaaacgcccgaccatggccgagcgtatagatggcttccagcacgctggttttgccactgccgttggcgcctaccagaaagttaaagccgggagataaggcgagatccgcggtttcaatgttgcggaaatcgcggatcaacaagcgggtgagggacattacagtctcattggcatgacaacataagccgcgctctggctggccgcatcttcaatctgcacgctggaaacgctatcggtcagcatcatgcggacgttttcgcatttcagcgcgttcagaacatccagcacataactgacgttgaagccgatttccatctccgcaccgctataggtaacgtcgaggatctcttccgcttcttcctgttccgggttgttggcggtgattttcagctggttttcgctgacataaagacgtacgccgcggaatttctcgttagagagaatcgccgcgcgagcaaacgcctgcttgagcagatcgcagccagcttccagatgtttgtccgggttcttcggcagaacgcggcgataatccgggaagcgaccatccaccagtttggaggtgaagataaagtcgccaacgtgggcgcgaatgttgttgctgccaatctgtacgcgcagcggattgtcgccgccgtcgagcatacgcatcagttcaatcacgcctttacgcggtacgatcacgctatggcttggcaaagattgaccaattggcatactacagaccgccagacggtggccgtcggttgccacggtgcgcagttcttcaccttcggtttcaaacagcataccatttaagtaatagcgaacgtcctgatgcgccatagaaaactgggtcgcttcaatcagacgcttcatcgttgcctgcggcagggtaaattcgacttcactctgccagtcatcgaggttcgggaaatccgccgctggcagggtagacaggctaaaacggctacgcccggagcgtaccagcatccgttcaccttccagctgcacggcaatttccgcgccttcaggcagaccacggcagatatcaaagaatttgcgcgccggaacggtcgtcgctcctggctcgtgtggctgaaccagcgcaacacgtgccaccatttccatctcgagatcagtaccggtcaggctcaacgtaccgtcagcaacctgtaacagcagattaccgagaatcggtagcgtaggacgaccacctaacggaccgctcacctgttgtagcggttttaataaatgctcacgttctacggtaaatttcataggtttagctactcaatgttctgattaaattactaaaatcttctttgatatcgtggctctcttcacgcaactgctcgatcttacggcaggcatgaagcaccgtcgtgtggtcacggccaccaaacgcatcgccaatctccggcagactgtggttagtcagctctttcgccagcgccatcgccatctggcgcggacgcgccacgctgcgggatcgacgcttggaaaggagatccgcgactttgatcttgtagtactccgccaccgtcttctgaatattgtcgatggtgaccagtttttcctgcaatgccagcaagtcgcgcagcgcctcacgcacgaagtcgatggtgatcgcccgtccggtaaagttggcattggcaatgacgcggttcagcgccccttccagctcacgtacgttagatcgtagacgcttggcgataaagaacgccacttcgcccggcaaacgaatgtcgttttcgtcggcctttttcatcaggatcgccacacgggtttccagctctggcggttcgatcgccacagtcagtccccaaccgaagcgggatttcaaacgatcctcaacgccgttgatctctttcggatagcgatcgctggtgagaatgatctgttgattaccttccagcagggcgttgaaggtgtggaaaaactcttcctgagatcgttctttattagcaaaaaactgaatatcgtcgatcagcagtgcatctacggaacggtagtagcgtttaaactcttcgatcgcgttgttttgcagggctttaaccatgtcctgaacaaagcgctcggagtgcatataaaccactttggcattcggcttgcgcgccataatgccgttacccaccgcatgcagcaggtgagttttacccagacccgtgccgccataaaggaacaacgggttataggcaccgccagggttatccgccacctggcgagccgccgcgcgcgccagttggttagatttaccttcaacgaagttatcaaacgtgtgtttgacgtttacgttagaacgataggtcggttctgccggggccgggacgttatcccaaccactgcgcgtagaaggcgcagcacgttgcggctgcgtttgcgccacctgtgcaggggccgcgacgttgctcgtcactgccgcttgtggcgtttgcgtcaccggtttggtgccgacttcaaaacgcagctgtggggcatccgctccgcagaaactggttagcagtccattgatattattaaggtacttgtcccgtacccaatcgaggacaaaacggtttggcgcgtacagggccagcgtgttatcgctcagttccgcctgcaatgggcgtatccacatactgaattctgtggctggtaactcatcctgcaatcgggcaagacactgctgccaaaggctaagactcacggcggactccactcgaacaaaagtcgataatgactaaggctgaaacattcatgattgttgacgtacgtcgaaaagaccctgcttgagggtgacgcacgaaccgctgtctgcggttatatgcccgatcaagatcctgcaaaacgatcgggaccgcggatcatagcctaaactgcgcaagagatcttctgtttctcacagattttcccgatttatccacaggactttccagaactcgctaagtgtaaacgatcctgccgcgaggcgggcacgatttacgccgcatattggaaaatttaatgaccatagacaaaaattggcttaatcgatctaataaagatccaggacgatccttgcgctttacccatcagcccgtataatcctccacccggcgcgccatgctggtttccactggtgtgaggtcgtacattttccctgcgaaaaggtgcggaaaagcgcggtaaataaggaaagagaattgactccggagtgtacaattattacaatccggcctctttaatcacccatggcttcggtgtccatcgtttcatttttcggcggatatccaataaagccattgaatttattcaagtttaggtagaaatcgccatgaaacgcacttttcaaccgtctgtactgaagcgcaaccgttctcacggcttccgtgctcgtatggctactaaaaatggtcgtcaggttctggcacgtcgtcgtgctaaaggccgcgctcgtctgaccgtttctaagtaataaagctaacccctgagtggttaagctcgcatttcccagggagttacgcttgttaactcccagtcaattcacattcgtcttccagcagccacaacgggctggcacgccgcaaattaccattctcggccgcctgaatagcctggggcatccccgtatcggtcttacagtcgccaagaaaaacgttcgacgcgcccatgaacgcaatcggattaaacgtctgacgcgtgaaagcttccgtctgcgccaacatgaactcccggctatggatttcgtggtggtggcgaaaaaaggggttgccgacctcgataaccgtgctctcagcgaagcgttggaaaaattatggcgccgccactgtcgcctggctcgcgggtcctgacttaatcggaagcgttggaaaaattatggcgccgccactgagccctggcagccgggtcctgatagccctcattcgggtctatcaacgcctgattagtccgctactcgggccgcattgtcgtttcactccaacctgtagtagctacggaattgaggcattgcgcaggtttggagtgataaaaggcagttggttgacggtgaaacgcgtattaaaatgccaccctttacaccctggtggtgacgatcccgtcccgcccggaccatttgataccagagaacactaacgatggatagccaacgcaatcttttagtcatcgctttgctgttcgtgtctttcatgatctggcaagcctgggagcaggataaaaacccgcaacctcaggcccaacagaccacgcagacaacgaccaccgcagcgggtagcgccgccgaccagggcgtaccggccagtggccaggggaaactgatcagcgttaagaccgacgtgcttgatctgaccatcaacacccgtggtggtgatgttgagcaagctctgctgcctgcttacccgaaagagctgaactctacccagccgttccagctgttggaaactagtccgcagtttatttatcaggcacagagcggtctgaccggtcgtgatggcccggataacccggctaacggcccgcgtccgctgtataacgttgaaaaagacgcttatgtgctggctgaaggtcaaaacgaactgcaggtgccgatgacgtataccgacgcggcaggcaacacgtttaccaaaacgtttgtcctgaaacgtggtgattacgctgtcaacgtcaactacaacgtgcagaacgctggcgagaaaccgctggaaatctccagctttggtcagttgaagcaatccatcactctgccaccgcatctcgataccggaagcagcaacttcgcactgcacaccttccgtggcgcggcgtactccacgcctgacgagaagtatgagaaatacaagttcgataccattgccgataacgaaaacctgaacatctctagcaaaggtggttgggtggcgatgctgcaacagtatttcgcgacggcgtggatcccgcataacgacggtaccaacaacttctataccgctaatctgggtaacggcatcgccgctatcggctataaatctcagccggtactggttcagcctggtcagactggcgcgatgaacagcaccctgtgggttggcccggaaatccaggacaaaatggcagctgttgctccgcacctggatctgaccgttgattacggttggttgtggttcatctctcagccgctgttcaaactgctgaaatggatccatagctttgtgggtaactggggcttctccattatcatcatcacctttatcgttcgtggcatcatgtacccgctgaccaaagcgcagtacacctccatggcgaagatgcgtatgttgcagccgaagattcaggcaatgcgtgagcgtctgggcgatgacaaacagcgtatcagccaggaaatgatggcgctgtacaaagctgagaaggttaacccgctgggcggctgcttcccgctgctgatccagatgccaatcttcctggcgttgtactacatgctgatgggttccgttgaactgcgtcaggcaccgtttgcactgtggatccacgacctgagcgcacaggacccgtactacatcctgccgatcctgatgggcgtaacgatgttcttcattcagaagatgagcccgaccacagtgaccgacccgatgcagcagaagatcatgacctttatgccggtcatcttcaccgtgttcttcctgtggttcccgagtggtctggtgctgtactatatcgtcagcaacctggtaaccattattcagcagcagctgatttaccgtggtctggaaaaacgtggcctgcatagccgcgagaagaaaaaatcctgattcggtgagttttcgctaaaataagggcggtcagttgaccgccttttttcttttcgtagggcggataagcaccgcgcatccgccacacaaagcaacaggaacatcatgagcgataatgacactatcgtagcccaggccacgcctccgggacgtggcggcgttggcatcctgcgcatctccggcttcaaagcccgtgaagttgccgaaaccgtgctgggtaaactgcctaagccgcgctacgccgattatcttccgtttaaagacgccgacggcagcgtgctcgatcaggggattgcgctatggttccctggcccgaacagcttcaccggcgaagatgtgctggaactgcaaggtcatggcggtccggtgatcctcgacctgctgttaaaacgcattctgaccattcccggcctgcggattgctcgccctggtgagttttccgaacgcgcgtttcttaacgataaacttgacttagcccaggccgaggcgattgccgatcttatcgacgccagtagcgaacaggcggcccgtagcgcacttaacagcctgcaaggcgcattctccgcacgggttaatcatctggtagaagccctcacccacttgcgcatttacgtcgaagcggcaattgatttccccgatgaagagatcgatttcctctccgacggaaaaattgaagcccagctcaatgacgttattgccgatcttgatgcagtgcgtgctgaagcacgtcagggtagtttgttgcgcgaagggatgaaagtggtgattgccggacgtcctaacgccggtaaaagcagcctgttaaacgcgctggcggggcgtgaagcggcaatcgtaaccgatatcgccggaactacgcgtgacgtgctgcgtgagcatatccacattgacggaatgccgctgcatatcatcgataccgccgggctacgtgaagccagtgacgaagtagaacgtattggtatcgagcgcgcgtggcaggaaattgaacaggccgaccgcgtgctgtttatggtcgatggcaccacaacagacgccgtggatccggcagagatctggccggaatttattgcccgtctgccagcgaaactgccgatcaccgtggtgcgcaataaagccgatatcaccggcgaaacgctgggaatgagtgaagtgaacggtcacgcgttaattcgtctcagcgcaaggactggtgaaggcgtggacgtgctgcgtaaccatctcaaacagagcatgggctttgacaccaacatggaaggcggcttcctggcgcgtcgtcgccacctacaggcgctggaacaggcagcggaacatctacaacagggcaaagcgcaactgttgggagcctgggcaggtgaactgctggcggaagagttgcgtctggcacagcagaacttaagcgaaatcaccggggaatttactagtgacgacctgctggggcggattttctccagcttctgtattggtaagtaaccgcgcttacgaggccgcattctgactgtcagatgcggcttcgcttcattgttaccactcctgttattcctcaaccctttttttaaacattaaaattcttacgtaatttataatctttaaaaaaagcatttaatattgctccccgaacgattgtgattcgattcacatttaaacaatttcagaatagacaaaaactctgagtgtaataatgtagcctcgtgtcttgcgaggataagtgcattatgaatatcttacatatatgtgtgaccagtaaatggttcaatattgacaacaaaattgtcgatcaccgcccttgatttgcccttctgtagccatcaccagagccaaaccgattagattcaatgtgatctatttgtttgctatatcttaattttgccttttgcaaaggtcatctctcgtttatttacttgttttagtaaatgatggtgcttgcatatatatctggcgaattaatcggtatagcagatgtaatattcacagggatcactgtaattaaaataaatgaaggattatgtaatggaaaactttaaacatctccctgaaccgttccgcattcgtgttattgagccagtaaaacgtaccactcgcgcttatcgtgaagaggcaattattaaatccggtatgaacccgttcctgctggatagcgaagatgtttttatcgatttactgaccgacagcggcaccggggcggtgacgcagagcatgcaggctgcgatgatgcgcggcgacgaagcctacagcggcagtcgtagctactatgcgttagccgagagtgtgaaaaatatctttggttatcaatacaccattccgactcaccagggccgtggcgcagagcaaatctatattccggtactgattaaaaaacgcgagcaggaaaaaggcctggatcgcagcaaaatggtggcgttctctaactatttctttgataccacgcagggccatagccagatcaacggctgtaccgtgcgtaacgtctatatcaaagaagccttcgatacgggcgtgcgttacgactttaaaggcaactttgaccttgagggattagaacgcggtattgaagaagttggtccgaataacgtgccgtatatcgttgcaaccatcaccagtaactctgcaggtggtcagccggttagtctggcaaacttaaaagcgatgtacagcatcgcgaagaaatacgatattccggtggtaatggactccgcgcgctttgctgaaaacgcctatttcatcaagcagcgtgaagcagaatacaaagactggaccatcgagcagatcacccgcgaaacctacaaatatgccgatatgctggcgatgtccgccaagaaagatgcgatggtgccgatgggcggcctgctgtgcatgaaagacgacagcttctttgatgtgtacaccgagtgcagaaccctttgcgtggtgcaggaaggcttcccgacatatggcggcctggaaggcggcgcgatggagcgtctggcggtaggtctgtatgacggcatgaatctcgactggctggcttatcgtatcgcgcaggtacagtatctggtcgatggtctggaagagattggcgttgtctgccagcaggcgggcggtcacgcggcattcgttgatgccggtaaactgttgccgcatatcccggcagaccagttcccggcacaggcgctggcctgcgagctgtataaagtcgccggtatccgtgcggtagaaattggctctttcctgttaggccgcgatccgaaaaccggtaaacaactgccatgcccggctgaactgctgcgtttaaccattccgcgcgcaacatatactcaaacacatatggacttcattattgaagcctttaaacatgtgaaagagaacgcggcgaatattaaaggattaacctttacgtacgaaccgaaagtattgcgtcacttcaccgcaaaacttaaagaagtttaattaatactacagagtggctataaggatgttagccactctcttaccctacatcctcaataacaaaaatagccttcctctaaaggtggcatcatgactgatcaagctgaaaaaaagcactctgcattttggggtgttatggttatagcaggtacagtaattggtggaggtatgtttgctttacctgttgatcttgccggtgcctggtttttctggggtgcctttatccttatcattgcctggtttagtatgcttcattccgggttattgttattagaagcaaatttaaattatcccgtcggctccagttttaacaccatcaccaaagatttaatcggtaacacctggaacattatcagcggtattaccgttgccttcgttctctatatcctcacttatgcctatatctctgctaatggtgcgatcattagtgaaacgataagtatgaatttgggttatcacgctaatccacgtattgtcgggatctgcacagccattttcgttgccagcgtattgtggttaagtagcttagccgccagtcgtattaccagtttgttcctcgggctgaagattatctcctttgtgatcgtgtttggttcttttttcttccaggtcgattactccattctgcgcgacgccaccagctccactgcgggaacgtcttacttcccgtatatctttatggctttgccggtgtgtctggcgagttttggtttccacggcaatattcccagcctgattatttgctatggaaaacgcaaagataagttaatcaaaagcgtggtatttggtagcctgctggcgctggtgatttatctcttctggctctattgcaccatggggaatattccgcgagaaagctttaaggcgattatctccagtggcggcaacgttgatagcctggtgaaaagcttcctcggcaccaaacagcacggcattatcgagttttgcctgctggtgttctctaacttagctgttgccagtagcttctttggtgtcacgctggggttgttcgattatctggcggacctgtttaagattgataactcccacggcgggcgtttcaaaaccgtgctgttaaccttcctgccacctgcgttgttgtatctgatcttcccgaacggctttatttacgggatcggcggtgccgggctgtgcgccaccatctgggcggtcattattcccgcagtgcttgcaatcaaagctcgcaagaagtttcccaatcagatgttcacggtctggggcggcaatcttattccggcgattgtcattctctttggtataaccgtgattttgtgctggttcggcaacgtctttaacgtgttacctaaatttggctaaatccttcaagaagccagccattcgctggcttcttgcctctcaggaaatcacttatgtccaaatggcaactcgcctgatcctccttcaccacgtatgctttgcgtcaccttactatcaggacgctttagcccatgtcccgctttttgatttgtagttttgccctggttttactttatcccgccgggattgatatgtacctcgttggtttaccgcgcatcgccgccgatctcaatgccagcgaagcgcagttgcatattgcgttctccgtatatctggcggggatggcagctgcgatgttatttgccggtaaagtggccgatcgtagtgggagaaagccggtcgccatacccggcgcggcgctatttattattgccagcgtgttctgtagtctggctgaaaccagcacgttatttcttgcaggccgatttctacaggggttgggcgcaggctgttgttacgtagtggcgttcgctattttgcgcgacacgctggatgatcgacgtcgggctaaagtgctgagtttactcaacggtattacctgcatcattccggtgttagcgccagtgctcggacatctgattatgcttaaattcccgtggcagagtctgttctgggcgatggcaatgatgggcatcgcggtactgatgttgtctttgtttattttaaaagaaacgcgcccagcggcccccgcagctagcgataaaccacgagaaaatagcgagagcctgcttaaccgttttttcctcagccgtgttgttatcaccaccctcagcgttagcgtgatcctcactttcgtcaacacgagtccggtattgctgatggaaatcatggggtttgagcgcggtgaatacgccaccattatggcgctgaccgctggcgtcagcatgaccgttagtttctccacgccatttgcgctgggaatttttaagccacgtacgttgatgatcaccagccaggtgttattcctggcggcggggatcactcttgccgttagtccttcccatgcggtttctctgtttggtatcacgctgatttgcgccggtttcagcgtaggttttggtgtggcgatgagtcaggcgttagggccgtttagtttacgcgcgggcgtagccagcagcaccttaggtattgcgcaggtttgcggtagcagtctgtggatttggctggcagcggtggttggtatcggcgcatggaatatgctgatcgggattctgattgcctgtagcatagtgagcctgttgctgattatgttcgtcgcgcctggacgccccgttgccgctcatgaagaaatccatcaccacgcttgatctcaatctgctgctttgtctgcaactgctgatgcaggagcgcagcgtaaccaaagcggcgaagcggataaacgtgacacctagcgcggtgagtaagagcctggcaaagttaagagcgtggtttgacgacccgctctttgtgaacagtccgctgggtctgagccccacaccgctgatggtcagcatggagcaaaatctggcggagtggatgcaaatgagcaacctgctgctggataaaccgcaccaccagacaccgcgcggcctgaagtttgagctggcggcggaaagtccgctgatgatgatcatgcttaatgcgctgagcaaacagatctaccaacgttacccgcaggcgaccatcaaattacgtaactgggattacgattccttagatgccattactcgtggtgaagtggatatcggtttttccggtcgcgaaagccatcctcgcagccgggagctgttaagcagcctaccgttagccattgattatgaagtgctgtttagtgatgtgccctgcgtctggttacgcaaagatcatccggcactgcatcaaacgtggaatctggacaccttcttacgttatccgcatatcagcatttgctgggaacagagcgatacctgggcgctggacaatgtgttacaggagctgggacgcgaacgcacgattgctatgagcctgccggaattcgagcagagtctgtttatggcagcgcaacccgacaatctgctactggcgaccgcgccgcgctactgtcagtactacaatcaactccatcaactgccgttggttgctcttcctctcccgtttgacgaaagccagcaaaaaaagctggaagttccttttaccctgctgtggcataaacggaacagccataatccgaagatcgtctggttacgggaaaccattaaaaacctttacgcgagcatggcataaccgaatcgtatgaaacgcgacccaatttcacaataaaatgtaaaaaagttgtaataagcttgtctgaatcgaacttttagccgctttagtctgtccatcattccagtaaatgattactcttgtattcataatggaccattaagcatggagcgaaaaatggcgactcactttgcccgagggattttaacggaaggacatctgatttctgttcgtctcccctcccagtgtcatcaagaagcccgaaacattccccctcatcgtcaaagccgttttctggcgtccagaggtttactcgcagaactgatgttcatgctgtatggcattggcgaattgccggaaatcgtcaccctgccgaaaggtaaaccggttttcagtgataaaaatttgcctagcttttccatttcctatgccgggaatatggttggcgtggcgttaacaaccgaaggtgaatgtggcctcgatatggaactacagcgtgcgacgcgcgggtttcatagcccacacgcgcccgataaccacaccttttccagcaatgaaagcctatggatcagtaaacaaaacgatcctaacgaagcgcgggcgcagctcatcacgctgcgccgaagcgtgctaaaactaaccggtgatgttttgaatgacgatccgcgcgatctgcagctgctgcccattgccggacgcctgaaatgtgctcatgtaaatcatgtagaagcgttatgcgacgcggaagacgtgctggtgtggtccgtggcggtcacgcccacgattgaaaagctcagtgtctgggagttagatggcaaacacggctggaaaagcctgccggatattcacagccgcgccaacaatcctaccagccggatgatgcgttttgcccaactctctaccgtgaaggcttttagcccaaattgatagacaaccacaggagtcatcatgtctgaaaaattgcaggtggttacgttactggggagcctgcgcaaaggcagttttaatggcatggttgcacgtaccctgccgaaaattgctccggcgagcatggaagtcaatgcgttaccatccattgccgacattcccttgtatgacgctgacgtacagcaggaagaaggttttccagcaacggttgaagctctggcggaacagatccgtcaggctgacggtgtggtgatcgtcacgccggaatataactacagcgtaccgggtgggctgaaaaatgccatcgactggctttcccgcctgccggatcaaccgctggccggtaaaccggtattgattcagaccagcagtatgggcgtgattggcggcgcgcgctgtcagtatcacctgcgccagattctggttttcctcgatgcaatggtgatgaacaagccggaatttatgggcggcgtgattcagaacaaagttgatccgcaaaccggagaagtgattgatcagggtacgctggaccacctgaccgggcaattgaccgcatttggtgagtttattcagcgagttaagatctaaataaaaaacccgccagcaatcatgcatggcgggtttttaacgcgctatcgattttagtgagcgtcgataaagacaatcttcaggataaacagcagcgcaacgatgattacgcacgggcttagatcacgcagacgtccggtaccgattttcatcacgcagtaggagataaagcccagcgcgataccttcggtaatgctgaagctgaacggcatcatcacggcggtaataaacgccggaacagattcagtaagatcctgccagttcacgcgtgccagactggaagtcatcagcacgccaacgtaaatcagcgcaccagctgcagcgtagcctggcaccatccccgccagcgggctcagaaagataaccagcaggaacagcagaccaacaaccactgccgtcagaccggtacgaccgccaacgcttacgccggaagaggactcaatataagccgtaacggaagaagtaccgataaagctaccggtcacggaagagatactgtcgacatacagcgcctgcttcatgcgcgggaatttccccttctcatccgccagacctgctttatcggtcacgccaatcagcgtaccggaggagtcaaacaagttgaccaacatgaaagagaaaatcacccctgccagcccgaggttaaagctcccggctaaatctacatgacccacaactgtcattacgctcggcggcgcagaaacgatgccattgtagtgcacatcacccagcatccagcccagcagcgtcgtcaccacgatagaaaccagcaccgctgcgtgaatgttgcggctggccagaatagcaatgatgaagaagccgaggatacccagaagtacgctgtgagaagtcagattaccgatgctcaccagcgtttccgggttagcgacaatcacacctgcgtttttcagccccatcatgccaatgaacagaccgataccgctggtaatacccacacgcagactcaccggaatgttggctatcatccagtagcgaacgcggaaaatcgtcagtaacagcagacctatcgcgccccagaagattgcgcccatcccgacctgccacggcaagcccatcgcctgtacaacgacaaaagcgaagaacgcattcaggcccatagcgggtgccagtgcaactggcaggttagcaaacagtcccatcataatactgccgaatgcagcgatcagacaggtagtgacgaagacggcgctggtatccatgccagcaacgccaagaatttgcgggttaacaaaaacgatgtaaaccatcgtcaggaaggtggtaaaaccggcgatcacttcggtccgtgccgtcgtgccatgttcgcgcagtttaaacacgcgttccagcatcccctgaccagaagtctgggtggtatgttgatgactcattatctatttccgaacaaggagggaaaatccgtcgctatcgtataccaaaatgcgacaataggcgcgtttgtgagagacttttttattggatttacttatacggcaacgattgcgttgcgcaaatcggctctacgaaaacgttaaactgattaaaaaggaaaggcatgtcccggatagaagcggtatttttcgactgcgacggtacgctggtcgacagtgaagtcatttgctctcgcgcatatgtaacgatgtttcaggaatttggtattacgctcgatcctgaagaggtattcaaacgtttcaaaggtgtaaaactgtacgaaattatcgatattgtttcccttgaacatggtgttacgttagcgaaaacagaagctgaacacgtttaccgtgcagaagtcgctcggctgttcgatagtgaactggaagccatcgaaggggctggagcgctcctgagtgcgatcactgcgccaatgtgtgtggtatctaacggcccaaataacaaaatgcagcattctatgggcaagctgaatatgttgcactacttcccggataaactgttcagcggctacgatattcagcgctggaagccagacccggcgttaatgttccatgcggcaaaagcgatgaatgtaaatgtagaaaactgcattctggttgatgacagtgttgccggtgcacaatctggtatcgacgcaggtatggaagtgttctacttctgcgccgacccgcacaataagccgatcgttcacccgaaagtcaccacctttacccatcttagccagttacctgaactgtggaaagcgcgtggttgggatattacggcataattcttcacactcccttcacttaccccgcttaaattggcgctcaaaggtaagtaaagggagtttgatatgtctgttagtcgtcgggtaatacatcacggactttattttgcagttttaggaccgttaattggtgttctgtttcttgtcctctacatattcttcgcaaaagaaccgctggttctttgggtgataatacatccaatttttctcttattgagcataactacgggagctattcctgcgttgttaaccggtgtaatggttgcctgtctgccggaaaagatcgggagtcagaaacgttatcgttgtctggctggtggcataggtggcgtcgttatcaccgagatctattgtgcagttattgtacatattaagggcatggcttccagcgagttgtttgaaaacattctttctggtgacagtctcgttgtccgcatcattcctgcattgctggcaggtgtggtgatgagcagaatcattacccgtctacccggattggatattagttgtcctgaaacagactctttaagttaagcgggatactttatctttgggctactcaaaagcagacaggatgtttctatgactcaaaatatcaggccgttaccccaattcaaatatcatcccaagccactggaaacaggcgcatttgaacaggataaaaccgtagagtgcgattgctgtgaacaacagacgagtgtttattacagcggtcccttttattgcgttgatgaagttgaacatctctgtccgtggtgtattgcggacggttctgctgctgaaaagtttgcaggtagttttcaggatgatgccagcatagaaggtgttgaatttgagtatgatgaagaggacgaatttgccggtattaagaacacatatcctgatgaaatgctgaaagagttggttgaacgcacgccaggttatcatggatggcagcaggaattctggctcgcgcattgtggcgatttctgtgtttttatcggctatgtgggctggaatgatataaaagatcgcctcgatgaatttgccaaccttgaagaagattgtgagaatttcggtattagaaattctgatctagctaaatgcctgcaaaagggtggtcattgtcagggttatctcttccgctgtctccactgcggcaagctgagactgtggggtgattttagctaattatttaaataatgagaacaggccggagcgtaattcacacatccggccttatttcttaagcttaaccgagtgctaattctgcggcagcggctttatcagcgattaccatcaggctaggatgcagctgcaacacggaagctggaacatcttcggtaaccggaccttgcagaacatttttcagtgcctgcgctttacccgcgccgctgacaattatcagcaagtttttcgccgccatgatgcttttcggccccatcgtcacgtagctgtcaggcactaagctaaagtcgccgcccaactcgccatgcgccacaatatcaaccatctctccctggatcgggaactccacggtttgctcatggaaatgggtcgtattcggcaaattgccacaaaaatgaccatctgcacctaatcccagcaccaccaaatccagtccgccttcacgcgccagtttctgatcatgctcgcggtagttatcaatagtgagcttctggatattctcttctttgatccccgcaggggtgaaaaacagattacgcagattggtaatcgttacgccttctccctctttgccgcgaaatggaatttcatcaaaattatagaaatagcagttatcgtaccagggcttacctttaaccagggtggtgaggtattcatacatgcctttgggcgtgctaccggcggtaattgccaggttaacacgacgcgtcttgctcatataaccaagcagatggtgtgccgcgacacggctcatttcctggtaatcttcggtaatgattaatttcatcttaatgccttattttatttaaataatttctgtacaaaggctgcataggctggtcgccagacatccatttcatggttcagacccggatattcctggtaatcaaagttaatttttttctgctcaagctcagttttcagcccggcgatatccttgccggttacgacatctttatcccccacaaccacagtaaaattacgtagttgctggttgatagctgccggatcgttcagtcgggccgcgacaccttcatccggtacggttgtcgtggtaacaccactgaatgtggccagccagccaaagctttccagatgattcattccggaaaccagcgcctggtacccgccttgactaagccctgccagcgcgcggccatcggcatctttacggacattaaaacgcttgctaatcagcgggataatatcgttcatcagttcgcgatctgccgctttagcattcagcggataaaagactttacgtctttcctgaggcacgaaatcttcgggaataatgcccttcgcatcggtttctgtatccgggatcaccaccagcatcggtttaattttcccttcagcaagcaggttatccatgatttgcgggatacgcccctgatcgatagcggaacgtccggtatcaccaaagccgtgatagaaatagagcactggcaaaggctcgcccatgccggtgtatcctggcggggtccagacatacatctgacgttcagattgcaatgcgttggagtggtaagttatggcgatcaaatcaccatgcgcaacagaacgcgtatccagataactgcctggcaccagaatcatactggagttaacctggcgctgaggattagtcattgcggtgcctgtatcaatgctgcgtacaccatcaacattgaaaaaatactcgtacaggttgcctttcaggataggtgtgcgccagctccagactcctgcttcgtctttggtcatcgggtgaatattgtccggaaccggaacacccaccactacagagacattttttgccccaggggcaaagtagcgaaaggtcacgctgttatcggcattgacctgagtcacatactgtttcaccgggatagtgggtgccgggctggctggcatatccgctgctatggcccactgagcagaaataccgctggcaatagccagcgttaaagcagcaatttttatattcatcgtaatattcctttcattaagttccattaccaccagatttcagcctgggcaccgacagcaaactggtcgtctttattgtcttcaaaggtgaagccatccagttcgttttccagggctttgatatacgtggcgtagaaacgaatttccggacggctggtcaacatactggtattgactttaaaggtatggaagagcgtggttttataaccagactcattaaatttattactattcgcatctttgttttgctgggtgaaatagcccagttcaacacctgtctggttatattggtcccaaatataggccgggcgaacaaccgcacgaatagattcgaaatcagagtgggcgcctgtttcgtagctatatatatcgttaccgaaggagtaaacaatcgcgttagctacaatgaaatgatcgccaatataggcttcgccctggctagtcagacgtaccgctgttccgccggtgtgatcaccataataacgaccattaaaggtggtaaatggacttgcgccagcataacggccaaagttactggcgatagagttattcgcgaccaggaaggagaattcgttgaagccacctttatcaaatttctgcgttaaagatgtgccaaacatccaggtatctttccagtcataatacccgttattatcctgattatctttttcgcttgcgctttcgtttgccgtgacataacgaccacttaccattaaggtggctttatcccataacgggatatctttatagcgtaaatcaatggtattggtattaatctgctgtttgttttgcaggctgcgatcgtaatcatcgacatcttcgcgaaccagcgcgatatcaattttacccggaccgactttccagttttccagacctacacccgctgcggcatcagtacgctgcgttttccagtcaagcatctggatttcaattttcggcgcaccgtgtttacccacccagaaatcagcctctggcgcaaagggcaggaaacctttggtggtaacgtacatatcggagaactgcatatagttctcgccaccggcgttatcgccaaaccagccggtagagtactgctgaccaacgttaccatccatcatcacaacggcatcaacccgtttgccgttttcgttgtagacacgttgttttaactgcaaatcaaaccagccggagtattcgttaccaaagcggcccagagaaccaatcgcccaacttttaggactaccatgagaggcggtcccccaaccagaacggtaatagccgttgtaactaaagccaatttcatctttcacaaatttactgaaatctttcagagtcatggaagaataaatgctgcctgtctcactggcatttttctcttcatttttgaccagtacagcatcaggttttgcggcactactggtcgggaacggattggcggcatacccttgatcattcgtacttacgctacgattcaccgtcgctggcgtatactttttcttctcttcatctttatactttttgagttcgctttgcgtttctcttaacgccttttctaataactcaaggcgttgttccaccgttaaactttcagccaaactttgtgcagaaaaggctaacggtgccattaataagatggcagaggtaataagatttcgtctaaacataatatccctttatggtgcaaagaaagaattaacgcatcgcatccagactgttctgaatgcgacgataattaaggtgctttaatggttattttttttaaactcagcccccgcgtcttgatcacctctgcataccatccgaagcttttcttgcgtgttcttgtgaggcttccttcgccattatcatcacgatccacataaataaagccgtagcgcttagacatttgactatgagatgcactgactaaatcaattggcccccaactggtgtaccccataatatccacaccatcggcaatcgcttcatttacctgtaccaggtgatcgtttaaataggcaattcgataatcgtcctgtatgctaccatccgcttcaacgctgtcttttgcgcctaatccgttctcgacaataaataacggtttttgataacgatcccaaagcgtatttaacagaacccgtaatccaaccggatcaatttgccacccccactcactacttttcagatgcggattggggatcatattcagtatgttgccctgcgcatttttattaatgctttcgtcgtgggaaacacaaccagtcatgtaataactaaaagagatgaaatcgacggtatgttttaaatcttctgcgtcactttcagtcatctcaatggtgatattgtggtcgcggaagaaacgctgcatatagccgggatactggccacgcgcctgaacatcaccaaagaacatccagcgccggttctcttccatggcctgcaacatatcctgtggctggcaggtgagggggtaaaccagcccaccgagaagcatattgccgattttcgcttcggggagcaggctatgacaggctttaactgcccgcgcactggcaaccagttgatggtggatagcctgataaacttccgcctcgccactctcttctgccagccccacgcccgtgaatggcgcgtgtaagctcatgttgatttcattaaacgtcagccataacgccactttatgttggtagcgagtaaagaccgtgcgggcgtaatgctcgaagtgatcgatgaccgctcgattagcccaaccgccgtagtttttcaccagcccatatggcatttcgtaatgggataacgttaccagcggcttgatccccgcctgcgccatttcatcaaacagccgatcgtaaaacgctaaccccgcttcattcggttcgacttcgtcgccctgagggaaaattcgcgcccaggcaatggaaatacgcagacaggtgaagcccatctcggcaaataacgcgatatcttccgggtaacggtgataaaaatcgatggcgacatctttgatattctctttccccaggatgcgcggttccatttttcccattacgccatgaggctgtaaatcactggtgctgatccctttgccatcttcctgccaggcaccttccacctgattggcagctgttgcgccaccccaaagaaatgtttctggaaatgctttcataattaactccttttatcgttagcgaatgatggataacagcggttcacctgcgcttatctgcgccgtgccgtggggtaatacgtccgtaaaatcatcgctattactgattaataccggcgtcgtcagatcaaatccggcctcgcgaatagcagggatatcaaaagaaatcagccgatcgcctgtattgaccttgtcacccacgttgacgtgagcggaaaagaatttgccgtccagttttacggtgtcgataccgacatgaatcaggatctccacaccatcatcactctcaatgccaatggcgtgtaatgtggcgaacaagctagcaattcgacccgcaaccggagaacgcacttcaccaacgctgggcagaatggcaatacctttacccaacaggccactggcaaacgtggtatcagcgacgtgaatgagcggcacaatctctcccgtcatcggactacagataccgccctgctcaggtggtgtaataacctctggtgttttctcttgcggggcaccctgcgctggctgacgtttagcggtgatgaaatgaagcatcaccgtaccgacaaatgcgcaaccgatggcaatgacaccgccaataacgctggcccagacggtgaaatcaattcccgtactcgggatggtttgcatgaaggtgaaaatacttggcaaaccaaaggagtagactttcgtttgcgcgtagccaataatggtggccccccaaagccccactgatacaggcgataacaaaggggtacttacgcggcaggttgacgccatataccgctggttcggtgataccaaacagactcgtcaacgccgcacttcccgccaccacttttttctgcgcatcgcgttcgcagaggaagacgccgagcgccgccccgacctgcgccataatggcgggcattaacagcgggatcatggtgtcgtagcccagcacggtgaagttattgatacacagcggcaccaggccccagtgcagtccgaacatgacgaagatttgccagaagccgcccattaccgcgcccgcaaatgcaggaaccgcctgataaagccagagataaccggcggcaatcagttcgcttatccaggtacttagcggccccaccagcagaaaggtgacgggtgtgataaccatcagacatagcaatggtgtgaagaaatttttgattgcgctcggtaaccacgcattaagtcggcgttccagaatgctgcacaaccaggcagaaaaaataatgggaataacgctactgctgtaattcaacaatgtgaccggaatacccaggaaatccagccccagcgcatccgctttttgcccgttctcgaaagcagtcagaattaatggatgcactaacgctccaccaatcaccatggcagtaaatggattaccgccgaagcgtttccccgcggtgtatcccaggattatcgggaagaaccaaaacaaggcatcactggcgctgaataaaattaaataagtaccactttgttcggtcgtccactgaaaagtgagcgccagagccagcatacctttcaagatcccggttgccgccatcaaaccgatcagaggcgtaaaaataccactaataacataaacaaagcggtttagcagattacctttatcatcattttccggtgcctgttgcgctttttcgtcaaggcctgccacactgttaaccgccaggaagacatcggccacatggttacctatgaccacctgaaactggccaccgctttccaccaccataataataccgggggtctttttcagtacctctgcttgcgctttgctttcatcctttaatttaaaacgtaatcgcgttgcgcaatgcatcagactcacaatgttatctgcgcccccgactcctgcgactatttttctggctaactccgtcataacttgccctctaccgctttgcggcaaaactccaaaaaaaaacctgaaaaaaacggcctgacgtgaatcaagcaatttttttcaggttttgcccgcttagtgcggtaacaatcctttactcagtaataatatttcagtgttctttgcgcacgcgctctatatttatggctaaaaacataatctctgcgggactaattttacgttgatactgcaaaccaataaaaatggcgatccgttccgcacattgccatgcttgcgggtaattttgttttactgcttgttgtaaactttcatcactatcgttaatactagcatgttcaagaatacgccaggataaaaacttcagatgtgtaaccagtcgctgataactcaagctttcttcctggtaattaaggctgaactgaaattttattaattgcagcatttcgcgcattaactgcgtgacacctgcaacatcctccatatttccgctcatttgggcactgaccagatgcatggcaataaagcccacttcatctttcggtaactgcacgcccaaccgtttatcaataatggttaacgcttcttcccctagctggaactctttcgggtaaagccgctggatatcccacagcaacgggttgggcagcaacacgttttgctgaaagcgtttaatcgcaaactggcaatggtcagttaggctgatataaatactgtcctgtaattttcccaagcgctcctgcgctaaagagataatacgatcacaggttgccatcacctcaagaggaatatgacttaagagttcgcttaatcgcccgttcagttcatgactgctcaaggcatactctttttctattccactactgttaattctttcgccagcgcgtttttgaaagccaattccgcgccccatgacgactttttcccgctgttgatcatcaataaccaccacaacattattgttgagaattttggtgatttgcatgttcatagcaaggaccttttttataaacaaaaaaacccgacttcaccagtattctctggttatgtcaggttttgcctgcgaatgcagtaacaatccagtcatttattaatggtttttataacgaacatccaggttcggaaattaatttaattgcgtgcagagaaaatagcaatgcgctattgataaaaatatgaccatgctcgcagttattaactttgtgtaattttaggaatttataaagttatatataacaaatcccaataattaagttattgggatttgtctggtgaattatttgtcgctatctttccccgccagcagtttatccagctcatcgccaccgacgtgacggaaatcctgccccttcacgtagtagaagataaactcacaaatattctggcagcggtcgccaatacgttcgatagaacgcgcgcagaacagcgcagtaagtacgctcggaatggtacggctatcttccatcatgtaggtcatcagttgacgaacaataccttcgtattcctgatcgacttttttatcttcacgataaatacgtaccgcttcgtcaatgtccatccgcgcgaacgcgtccagcacgtcgtgcagcatctggatggtatgacggcccaggctctccagacttaccagcaacggctgatgctgctgggagaatttctccagcgcagtacggcagattttgtccgccacgtcgccaatacgctccagctcggcaatggttttactgatcaccataaccagtcgcaggtcgctcgccgtcggctgacgtttggcgataatgcgcacgcaggcttcatcgatcgccacttccatcatgttgacgttcttgtcgccttcgatgacgcgcttcgccagatcgctgtcctggttatgcatcgcggtgattgcatcagaaagctgctgctccaccatgccgcccatggtcatcacctgcgtgcggatactttccagttcggcgttgaactggccggaaatatgtttattaagattgagactgtccataacgcactcctgaatcaaccgtaacgaccggtgatgtagtcttctgtttgtttcttcgctggcttggtgaacagatcgtccgtgttgctgaactcaatcaattcgcccaggtacataaacgccgtgtggtcggaacaacgcgcagcctgctgcatgttgtgggtgacgatcaccacggtgtaatcctgcttcagttcggtgatcagctcttcaatacgcccggtagagatagggtcgagcgcgctacacggttcgtcgagcagcagcacttccgggcgaatggcgataccacgcgcaatacacagacgctgttgctgaccaccagagagagagtaaccgctctggtgcaatttatctttggtttcgttccacaatgcggctttggtcaatgcccactgcacgcgctcgtccatgtcggcacgggagagcttctcaaacagacgaacgccaaaagcgatgttgtcgtagatggacatcggaaacggcgtcggtttctggaacaccatgcccactttcgcacgcagcagtgcgatatcctgagagttggtcaggatgttgtcgccatcaagcagaatttcaccttccgcacgctgctccgggtacagttcaaacattttgttgaaggtacgcagcagcgtgcttttaccgcagccggacggcccgataaacgccgttacctggtttttagcgatatccaggttgatgtttttcagggcatggaatttgccgtagtagaagttcaaattacgaacctgaattttactcggggcagtttcaaccatactcattgcaatcttttcctcatcgtgcctgatgcacttcgctaatcaggcttaccgtaggccggatcaggcgttcacgccgcatccggcaaagtgttaaccgtgtacagagtcaaaaaggcgctcggtcggtcccctcgcccctctggggagagggttagggtgaggggaaaaccgtgtcagcaatatcaaccgtgtttattcttcgcaaaaacaacgcgcgccagaatgttcagcagcagtacgcacagggtaatgatcaataccccggcccaggccaattgctgccattccgcaaacgggctcatcgcaaacttaaagatcgtcaccggcaggttggcgatcggctgcatcatgtccgtgctccagaactggttggagagcgcggtaaacagcagcggcgcggtttcaccagcaatacgggcaatcgccagcaggataccggtcataatcccggacacgctcgctttcagcgtaatcgcagagatcatcttccacttcggtgtacccagcgcataagccgcttcacgcaggctgtacggcaccagtttcagcatgttctcggtggtgcggataacaatcggcacctgcaacaacgccagggcaatcacgcccgcccagccggagaagtgctccatctgcgccaccacaatggtgtaaacaaacagaccaaccacaatgctcggcgcagagagcagaatgtcgttaatgaagcgaatcacttctgccagccaggatttacgaccatattccgccagataaatccccgccataatgcccagcggcgtaccgaataccgtggcccacaaaattaacagcccgctacccgccagagcgttcgccagaccaccaccttccgtattgggcggcggcgtcatttcagtgaacagcgccaggctcataccgtcgataccgcgagtgatggtggacattaaaatccagatcagccagaacaggccgaaggccatcgtcgccatgctgagcgtcagcgcaatacggtttttgaggcggcgacgcgcctgcattttgcggcgagattcagccagcgccgcagtggtttgcatttcaaccatagccattagcgtgccccctcattcttagccaggcgcataatcataaacttgcttgcggcgaggacgatgaaggtaatcacaaacaggatcaggcccagttccatcagtgcggcaacgtgcagaccggattccgcttccgcaaattcgttcgccagcgcagaggtgatactgttgcccggcatatacaggctggcgctgtcgagctggtaggtgttaccgatgataaaggtcaccgccatggtttcaccgagcgcgcggcccagccccagcatgatgccgccgataacaccatttttggtgaacggaagaacgatacgccagataacttcccaggtggtgcagccaataccgtaggcgctctctttcatcatcaccggggtttgttcgaacacatcacgcattaccgccgcaatgtacggaataatcatgatggcgaggatcacgcctgccgcgaggataccgataccaaatgcggggccagagaacagcgcgccaacaatcgggatattgctcatgatattgccgaccggctcctgaaagtaaacggcgaacagcggcgcaaagataaacaggccccacatgccgtaaacgatacttggaatggctgccagcagctcaatggcgatacccagcgggcgtttcagccagccaggcgcaagctcagtcaggaacagggcgataccgaaactcaccgggacggcgatcagcagcgcgataaagctagtcaccaacgtaccgtagatcggcaccagcgccccgtagatatcgttcggtgcatcccactctttggtccataggaaagccagaccaaatttctgaatgctcggccaggaggagatgatcagagagacaataatgccacccaacatcaatagcacaatcagcgccgccagttttaccagcacgctgaaaattatgtcgccctttttacccggtgggttaaaagcaggcttggttgcagccataagttactcttcagttaaacgcgtttacaaagtcattttgtaatgccggatgcggcgtaaaacaccgtacccggcctggagttttattagtacagcggcttaccgctactgtctttaatattggtcttccacgcagcgcgaacctgttcaactacactatccggcaggctggcgtaatccaggtcgttcgcctgtttagccccggttttgtacgcccagtcgaagaatttcagcacttctgtgccttgttctggtttcttctgatctttgtggatcagaatgaacgtggtagaggtaataggccatgcatcttcgcctttctggttggtcagatcctgagcgaaggttttgctccagtctgcaccttttgctgcattagcgaagttttcttcggtcggactaaccggtttaccatcagcggagatcagtttggtgtacgccaggttgttctgcttcgcgtaagcatattcaacataaccaattgcacccggcagacgctgaacgaacgcggcgataccgtcgttacctttaccgcccagaccgatcggccattttacggtagagccagtaccaacgttgtttttccactcttcgttcactttcgccaggtagctggtgaagacgaaggaagtcccggagccatctgcgcggcgtactacagcaatgttttgactaggcagtttcagacccggattcagtttggcgatggcttcatcatcccacttcttgattttgcccaggtagatgtcgccgagggttttaccatccagcaccagttcgccagacttcagccctggaatgttaaccgccagcaccacgccgccaatcacggtcgggaactggaacagaccttcctgagccagtttttcgtcagacagcggcgcgtcagaggcaccaaaatcaacggtattagcgataatctgttttacgccaccggaagaaccgataccctggtagttaactttattaccggtttctttctggtaagtgtcagcccatttggcatacaccggcgcagggaaggttgcacctgcacctgtcaggcttgcttctgcaaacacagagaaagcactcatgcttaaggtcgcggcgacaacagttgcgacggtggtacgcataactttcataatgtctcctgggaggattcataaagcattgtttgttggctacgagaagcaaaataggacaaacaggtgacagttatatgtaaggaatatgacagttttatgacagagagataaagtcttcagtctgatttaaataagcgttgatattcagtcaattacaaacattaataacgaagagatgacagaaaaattttcattctgtgacagagaaaaagtagccgaagatgacggtttgtcacatggagttggcaggatgtttgattaaaaacataacaggaagaaaaatgccccgcttacgcagggcatccatttattactcaaccgtaacgctttttgccaggttacgcggctggtcaacgtcggtgcctttgatcagcgcgacatggtaagccagcagctgcagcggaacggtgtagaagatcggtgcaatcacctcttccacatgcggcatctcgatgatgtgcatgttatcgctacttacaaaacccgcatcctgatcggcgaagacatacaactgaccgccacgcgcgcgaacttcttcaatgttggatttcagtttttccagcaattcgttgttcggtgcaacaacaataaccggcatatcggcatcaattagcgccagcggaccgtgtttcagttcgccagcagcgtaggcttcagcgtgaatgtaagagatctctttcaacttcaatgcgccttccagcgcgattgggtactgatcgccacggcccaggaacagcgcgtgatgtttgtcagagaaatcttctgccagcgcttcaatgcgtttgtcctgagacagcatctgctcaatacggctcggcagcgcctgcagaccatgcacgatgtcatgttcaatggaggcatccagacctttcaggcgagacagcttcgccaccagcatcaacagcacagttaactgagtggtgaatgctttagtggatgccacgccgatttctgtacccgcgttggtcattagcgccagatcggattcgcgcaccagagaagaacccggaacgttacagattgccagactaccaaggtaacccagctctttgctcagacgcaggccagccagggtatccgcggtttcgccagactgactcaaggtgatcatcaggctgttacgacgcacggcagatttgcgatagcggaattcagaggcgatttcgacgtcgcacggaatacctgctaggctttcaaaccagtagcgggaaaccataccggagttataagaagtaccacaggcgaggatctgaatatgctcaaccttgctcagcagttcgtcggcgttcggtcccagctcgcttaaatcaacctgaccgtggctgatgcgtccggtaagggtgtttttgatcgcgttcggctgttcgtagatctctttctgcatgtagtgacggtaaatgcctttatcgcccgcgtcatattgcagattggattcgatatcctgacgttttacttccgcgccagttttatcgaagatgtttacgctacggcgagtgatttccgcaatatcgccctcttcaaggaagataaagcgacgggtcaccggcaacagcgccagctggtcagaagcgataaagttttcgcccatccccaggccaatcaccagcggactaccagaacgtgccgccagcagggtatccgggtgacgggagtccatgatcactgtaccgtacgcaccacgcagctgcgggatagcacgcagaacggcctcacgcagagtcccgccttgtttcagctcccagttcaccagatgggcaatcacttcggtgtcggtttcagaaacgaaggtatagccacgcgcttttagctcttcacgcagcggttcatggttttcgatgatgccgttatgcaccaccacaatgtgttcagaaacatgcggatgcgcattcacttcactaggttcaccgtgggtcgcccagcgagtgtgagcaataccagtgccgccatgcagaggatgttcttccgctgcctgtgccagcatctggactttaccgaggcgacgcaggcgggtcatatgaccttctgcatcaacaacggccagaccggcagagtcatatccgcggtattccagacgacgtaaaccttcaagaaggatttctgctacatcacgttgcgcgatcgcgccaacaattccacacatagtttttgattccgatttatatcgttgtcggtcaacctgtatgcccgttttttcgggcgccccgagccttgtagagagtggggttatttttatagttactgcttgtgggagggagattatgttatctcctcatcccatgtgaccgggttagccggccagaatcactttttctttaccggacgacgccagccttctttctgagtctgcggcacacggctgatagctaatgcattttcgccgacattacgcgtcacagttgtacccgcagcaatggtcgcgcctttgcctactgttaccggggccaccagctgagtgtcggaaccaacaaacacatcgtcgccgataatggtcttaaatttattcgcaccatcgtagttgcaggtaatggttcccgcgccgatgttaacgttatcgccaatttccgcatcgcccaggtaagtcagatgaccagctttgctgcctttacccagacgcgcttttttcatctcaacgaagttaccgacgtgagcaccttccagcaactcagcaccaggacgcaaacgggcaaacgggccaatggtacaggccgctgccagattcgcatcttccacaacggtatacggactgatttcgcaatcatcgccaatcacgctgtttttaatcacgcaaccggtgccaattttcacgcgatgaccgagagtcacgttgccctcgatgataacgttagtatcaatttcaacatcgcgcccgtgagttagcgtaccacgcagatcaaaacgcgctggatcgcgcagcataacgcctgctaacagcagtttttcagcctgttcggactgataaacacgctccagacgggagagttgcaggcggttattcacgccttctacttcgcttaaacgttgcggatgaacggcgacgatttcacgcccttcctgatacgccagcgcaataatgtcggtgatgtagtattcgccctgagcattattgttggtcagcttcgccagccagcgtttcatatctgcgccgttggcaatcagaatgccggtgttgatctcctgaatctgacgctgctcgtcggtggcatctttgtgctcaacaatgccggtaactttgccgttttcacgggtgatacgtccataaccggtcggatcatccagtttcaccgtcagcagaccaatgccaccctgcggtttagcatcacgcagacgctggagtgtttcgacagagatcagcggcacgtcgccgtagagcattaaaatgtcttcatcatcggcaaagaaaggtgcggcctgctgcattgcatgacccgtacccagctgctctgcctgaagcacccagttaaggttgtcgtctttcagcgcctgttttagcagatcgccgccgtgaccgtacaccaggtgaacgtgcgctgcgcctaattcattcgcagcatcaatgacatgctgaaccatcgctttcccggcaagggtatgcagcactttcggaagatcggaatacatgcgcgtgcctttgcctgcggcaaggatcactacgctcatagcattattcaacatacgcgtcctgactgtaatttgagaacgaatttaaaccgcttcaccttgaaaaaactacatttttttcatcgtgaaatggacagaggataaattgttcaataacggattatccccgctgacgaaagcgccattttcgaccatcgtcacgccttttgtctgcagaaaattaaggcagtaccttaatttaagcgtcaggtggatgtttttgctcttatttcgatcaatgaataaacaggaaaacaggggggttttatatcagcaggatctatgtgaacgctattcaggacgggtcacacgcgcaaaaaaaagccagcctgtttccagactggcttttgtgcttttcaagccggtgttacatcgcttttttggtcaactcgataacgcgcagctgcgcgatcgctttggccagttccgcagacgcctgagcgtaatctacgtcgccgtgagagctgctaatgtgctcttcagccttacgtttcgcttccatggctcgcgcttcgtcgagatcctggccgcgaattgcggtgtcggccagaacggtcacgttgccaggctgcacttcaagaatgccgccagacagatagataaactcttcgtgaccgtgctgtttcacgatgcgaatcataccaggcttaatggcggtgagcagcggtgcgtggccagggtagatccccagttcaccttcgctacccgttacctggattttctcgaccagaccagagaacatttgttgctctgcgctgacgacgtccaggtggtaagtcattgccatatcaccctccgattaaggcgttaaagttttttggctttttccacagcttcttcgatggaaccgaccatgtagaacgcctgctccggcaggtgatcgtattcgccttccatgatgcctttaaagccacggatggtgtctttcagggagacgtatttacccggagaaccggtgaatacttctgccacgaagaacggctgggacaggaagcgctggatcttacgagcacgcgctaccaccagtttgtcttcttcagacagttcatccatacccaggatggcgatgatgtctttcagttcctgataacgttgcaggatggactgaacgccacgcgcggtgtcgtagtgttcctgaccaaccaccagcgggtccagctgacggctggtggagtccagcgggtcaacggccgggtagatacccagagacgcgatctgacggctcagtaccacggttgcgtcaaggtgcgcaaaggtggttgccggagacgggtcagtcaagtcatccgcaggtacgtatactgcctgtacggaggtgatagaaccagttttggtggaggtgatacgttcctgcagaacgcccatctcttccgccagggtcggctgataacctaccgcactaggcatacggcccagcagtgcggatacttccgtaccggccagggtgtaacgatagatgttgtcaacgaacagcagaacgtcacgaccttcgtcacggaatttctcagccatggtcagaccggtcagagcaacgcgcagacggtttcccggcggctcgttcatctggccatacaccagggatactttgtcgataacgttggagtcggtcatttcgtggtagaagtcgttaccctcacgagtacgttcacctacgcccgcaaacacagagtaaccggagtgctcgatcgcgatgttacgaatgagctccatcatgtttacggttttacctacacccgcaccaccgaacagaccaactttaccgcccttagcgaacggacacatcaggtcgataactttgataccggtttccagcagttcctgagagttactcagctcttcgtaggaaggtgctgcgcggtgaatcgcccaacgctcttcttcaccgatctcgcctttcatgtcgaccggttcacccagtacgttcatgatacggcccagagtcgctttacctaccgggacttcaatcgggtgttcgaggtcttttacatccagaccgcgacgcagaccgtcggaggaacccattgcgatggtacgtacgataccgccgccgagctgctgctgaacttccagcaccagacgctcattaccattttgcacctcaagagcatcgtacacgcgcggtacggcatcctgagggaattcgacgtcaactacggcgccgattacctggacaatctttccagtagccatcttaaatcctctacgaaataacctgtttaaaccgcggcggccccgctgacgatctcggtgagttcctgagtaatgctggcctgacgagctttgttgtataccaactgcagctctttaatcaggctgccgccattgtcggtcgcggctttcatcgccaccatacgggcggcctgctcgctggccaggttttcaaccacgccctgataaacctgagattcgacataacgacgcagcagggtatccagcaacgccttcggatcgggttcgtacaggtaatcccaggatttatgtttcagatcatcatcatcacttgccggtaacggcagcagctggctgatggtcggaacctgagacatggtgttaataaatttgttgctgacaatgtaaagcttgtccagacggccttcgtcgtaggcctgcaacatcacttttaccggaccgatcagttcggacagggaagggttatcccccatgccggtgacctgggcaacaacattgccgcccacggagttgaagaagctcacgcctttgctgccgatcattgcgaggtcgcattgaacgcctttgtcggtccaggtcttcatttccgccagcagttttttgaacaggttaatgttcaaaccaccgcacaaaccacggtcggtgctcaccaccaggtagcccacgcgtttaacgtcgcggtcttccaggtaagggtgcttatattccagattaccgtgtgcaaggtgaccaatcactttgcgcatggtttctgcataaggacggctggccgccatgcgatcctggcttttacgcattttggaagcggcgaccatctccatcgctttagtgatcttttgcgtgttctggacgcttgcgatcttactacgtatctcttttgcgccggccatgagcttctcctcaatgccttgcggcctgccctaaggcaagccgccagacgttaccaggattgggttgctttgaaggaatcgaggatgcctttcagcttgccttcgatttcgtcgttgtagccaccggtctggttgatctcttgcatcaacggagcgtgatcacggtcgacgtaagccagcagagcggcttcgaagctgccaattttgctcagttcaacatccgccaggtaaccacgttctgctgcgaacagaaccagagactgctgcgcaacggacatcggcgcatactgtttctgtttcagcagttcggtcactttctgaccgtggtcaagctgcttacgtgttgcatcgtcaaggtcggatgcaaactgagagaacgctgccagttcacgatactgtgccagagcggtacggataccaccggacagttttttcatgatcttggtctgtgctgcaccaccaacacgggatacggaaatacccgggttaaccgcaggacgaataccggcgttgaacaggttggtttccaggaagatctgaccatcggtaatggagattacgttggtcggaacgaacgcagaaacgtcacccgcctgagtttcgataatcggcagtgcggtcagagaaccggttttccctttcacttcacctttggtgaaggcttcaacgtattcggcgttaacacgtgcagcacgctccagcagacgagagtggaggtagaaaacgtcgcccgggaatgcttcacgtcctggcggacgacggagcagcagggagatctgacggtaagcaacagcctgtttagacaggtcatcgtaaatgatcagcgcatcttcaccgcggtcacggaagtattcgcccattgcgcaaccggcatacggtgccaggtattgcagtgcagcggattcagacgcggttgctaccacaacgatggtgttagccagtgcgccgtgctcttccagtttacgtaccacgttagaaatggtggacgctttctggccgatagcgacatagatacatttgataccggaatcgcgctggttgatgatggcatcgatagccagtgcggttttacctgtctgacggtcaccgatgatcaattcacgctgaccacgaccgattgggatcatggagtcaacggctttataaccggtctgtaccggctgatctacggactgacgttcgataacgcccggagcgattgcttctacagcagagaagccgtcgtgatccagcggacctttaccgtcgattggtgcacccagagtgttaaccacacggcccagcaggccacggccaaccggaacttccaggatacggccagtacacttaactttcatgccttcggcaaggtcagcgtacggacccataacaaccgcacctacagagtcgcgctcgaggttcagtgcgatagcgtaacggttacccggcagggagatcatttcaccctgcatacaatcggccaggccgtgaatgcggataacaccgtcacttacagaaacaatagtaccttcgttgtgagcttcactcacaacattgaactgagcaatgcgctgcttgatcagttcgctgatttcggtggaattcagttgcatgctccagtccccttaagactgcaagacgtctgcaaggcgctcaagacgaccgcgtacgctgccatcaatgaccatatcacccgctcggatgataacgcctgccattacagacttatcgattttgcaattcagcttaactttgcgactcagacgtttttccatcgcagcagaaattttcgcgagctgttgttcactcagtgcggcagcggaaatgacgtctacctcagcggtagcctcactcacggcacgcaggtgaataaactgctccagaacatccgggagcgcgttaagacgaccattttcagccataacccgaatcaggttctgaccgttttcgtccagttgctcaccacaaactgcgataaagctctcggcgagcgtttctggcgcaagcgcgccagagagaagctctgccatttgttcgtttttggttacctcggcggcaaacgccagcatgtcctgccagcgttctacactttggtgttcgacggcaaagtcaaaagctgctttggcgtaggggcgagctaccgtaataaattcagacatcagcccctccctccttacagttcagcgacaagtttatccacgatgtcgctgttagcagcttcatccacggaacgttcgatgatcttctcggcgccagcaacagccaggatagcaacttgcttacgcagctcttcacgggcacgtttacgctcggcttcaatttccgcctgcgcctgggccacgattttagtacgttcctgttctgcctcagctttcgcttcgtccagaatctggctgcggcgtttgttcgcctgctcgatgattacctgggcttccgctttcgcttttttcagctggtcggtcgcgctggcctttgcaaggtcaaggtccttatgtgctcgttctgcggaagcaaggccgtcagcaatttctttttgacgtttttcgatggctgccattaatggcggccatacgtacttcatgcagaacagaacgaacaggacaaacgcgatggcctggccgaggattgttgcgttaagattcacagcacaatgcctctatttagttaacgttctgatattgctctttaaataaaagcaacgcttattacgcgacagcgaacatcacgtacagacccagacctacagcgatcatcgggatagcatccaccagacccataacgataaagaactgagtacgcagcagaggaatcagatcaggttgacgcgctgcgccttccaggaatttacccccgaggatgccgataccgatcgcagcaccgattgccgccagacccatcatcacagcggcagccatgtacagcagatccatattcaggttttccatgacagtctccagtttgtttcagttaaaacgtagtagtgttggtaaattaatgttcttcagacgccatgctcagatagacgatcgtcagaaccatgaagatgaaggcttgcagcgtaatgatcaggatgtggaaaatggcccacggcacattcaggatccactgactccaccacggcaacagaccagcaatcagaatgaaaatcagctcaccggcatacatgttaccgaacagtcgcaaaccgagactaactggtttggacagcaggcttaccccttcaaggattaagttgacaggaatgaacgcccagtgattgaacggctgcagcgtcaactctttcgtgaagccgccgatgcctttcattttgatgctgtagaacagaatcaggataaatacgcccagtgccatagacagcgttacgttcacgtccgcagacggaaccacacgcagtgcaggcagacccagtacatgttcagcaatgtacggcagcaggtcgataggcagtaaatccatcaggttcatcaggaatacccagacgaagatcgtcagggccagcggagcaatcagcttgcttttgccatggtacatgtctttcacgctaccattaacaaagccgatcaccagctcaatcgcggtctgaaacttacctggcacaccgctggtcgcctttttggctacgctacggaataaaaccaggaacaacagacccagcaccacgctgaagaacatggagtcaatattgattgtccagaaggtggctggggggttttgtggatccaccaggctgaatgtacgcaggtccagctgaaggttattcaggtggtgtcctatgtaatcctgcggcgtcatattttcactagccatgatgccttttaccctttgttgttaattacagccggtgccagtatctgaaccaccagcaccaaaacccacgtaacgatcagcggcaagaataccgcctttaaaaccgccaacgccaccaccagtaacaccaacatcgccagaactttgaaagcttcgccaaatgcgaatgtccaggccacccggcctttcgctggtgtatgcgcctggtgacgccaggcaaatatcataaacaaaacgttaggcagaaagactgccaggcccccgcttattgcagagacgccccagaaggggtctttgaggctgaacagcaatccacttgctatcaccaccagtaactgaacgagcagaagcttccgagcaacgtttcgactcacgaggctcacagacatcacgtttttcactcctgctcccttcgaggtatgccgcgtgtcgtataaaactttctttaaggcttagagtcaagcatcaaaaagcggtcaaattatacggtgcgcccccgtgatttcaaacaataagtagccaaaaggtgaataaatgtttaaatatttttccagtgcatacaattgcgacttttctgctaaccctgttcgatcatgaaaaactgtaaataacgcgtaaacactggtgataaagcgtgcttcagatcacatattgcgcatgttcgcgcacagcatatttatttacttggcaaatgatgcctttgcaagtttatgatatttcagtctaaaaacagatactgttttaataaatgacatttacacaacaaaaaccacccattgacatttttaataatgttttaacagccaatgatggttcttagcgccgatttttagcagactgatattttcactaatgacttattttctgcttaccaaaaaaagccacgttatcttgttgatgcaaaagagtgaacgtggcgttaaatgtaaccagttatatcagtagaaaacctggttgttgttaacagtctaaccggtcaattttttatgatttttttgataaaaattaaattttatttgctttaatcaccaccagatgacgttcgccatccagggctggaacctgaagtttaaccacactttcgacctgatattcttcgggcaacaaagcgatttcatcttccggcatttgccctttcagcgcgtagaaacggccttgctcaccaggaagatggtggcaccagctcaccatatcgttcagagaggcaaaagcgcggctaattacgccatcaaatggcggctcactaggaaactcttctaccctgctctgtactggttcaatattctccagtttaagctcatgttgcacctgacgaaggaaacgcacgcgtttaccaaggctatccaacagagtgaaatgggcttcaggacgcacgatagagagtggaatgcctggcagtcctggtccggtgccgacatcgataaaccgttcaccttgcagatacggtgccaccacaatgctatcgagaatatggcgtaccagcatctcattaggatcgcggacgctagtcaggttgtacgctttgttccatttatgcagcatattcacgtaggcaataagctggtttttctggtgatcggtaaggctaatacctgcgtctttcagcagtaaggagagtttgttgagcacggtgattacctgttcttgatgcgttgcctggtaagcgggtgcttaccaggcatttttaatgcgttatgcgctacgacgcagcataccctgttttttcagccacaccagcagaatggagatggccgcaggcgtgacgccagaaatacggctagcttggccgatagaggctggtttgtgatcgttaagtttggcgatcacttcgttagaaagaccggatacctggcggtaatccagtgtcgcgggtagcagggtgttctcgttacgcagctgcttttcgatctcatcttgctggcgcgcgatataaccttcgtatttaacctgaatctcaacctgttccgccgcctgttcgtctgtcaacgcaggggcaaacggcgtcagcgtggttaatttttcataagtcatttccggacgacgcagcagatcttcaccactggcttcacgggaaagcggcgcagtcaggtgagcattcacttcggctgcagcttccgcgctcggggttacccaggtgcttttcagacgctgacgctcacgctcgatattctcaagtttctcgttaaagcgcgcccaacgttcgtcatccaccaggcccagttcacgaccgatttcagtcaaacgcagatccgcattatcttcgcgtagcatcagacgatattctgcgcggctagtaaacatacgatacggttctttggttcctaaagtgcacaggtcatcaactagtacgccgagatacgcctgagaacgtgccggagcccaaccttctttgtcagcagacagacgggcagcgttaagaccggccagcaaaccttgcgcagcggcttcttcgtaaccggtagtgccgttaatctgaccagcaaagaacagcccctggataaacttgctctccagcgtcggtttcaggtcgcgaggatcgaagaagtcatactcaatggcataacccggacgcacgatcttcgcgttttccatcccctgcatagagcggacgatttgcatctgcacatcgaacggcaggctggtggagataccgttcggataaatttcattagaggtcagtccttccggttcaaggaagatctgatgctgatttctgtcggcgaagcgcatgactttgtcttcgatgctcgggcagtagcgtgggccgacaccttcgatcacccctgcgtacattgggctacgatcgaggttactgcggatcacatcatgggttttctcgttggtatgagtgatataacacggcacctgctggggatgctgggacgcattgcccataaagctgaataccggcattgggttatcgccatgctgttgcgccagtacgctaaagtcgatggttcgagcatcaatacgcggtggtgtcccggttttcagacgaccaacgcgcagcggcagttcacgcaaacggcgagaaagcggaatggacggcggatcaccagcacggccaccgctgtaattatccagaccgatatgaattttaccgtcgaggaacgtcccaacggtgagcacgacggctttggcacggaacttcagtcccatttgggtaacagcaccgaccacgcgatcgttttcgacaataagatcttcaaccgcctgctggaagatcatcaggttcggttggttctccagcgccgtacgtaccgcctgacggtagagcacacgatccgcctgagctcgggtagcgcgaaccgccggtcctttgcttgcgtttagtatcctaaactggatacccgcctgatcgatcgctttcgccatcagaccgccgagtgcatccacttcttttaccagatgtcccttcccaataccgccgatcgccgggttgcagctcatctgccccagagtgtcgatattgtgtgtcaaaagcagagtctgttgacccatacgcgccgcggccatcgcggcctcggtgcctgcatgacccccgccaatgatgatgacgtcaaaaggatccggataaaacatggtgattgcctcgcataacgcggtatgaaaatggattgaagcccgggccgtggattctactcaactttgtcggcttgagaaagacctgggatcctgggtattaaaaagaagatctatttatttagagatctgttctattgtgatctcttattaggatcgcactgccctgtggataacaaggatccggcttttaagatcaacaacctggaaaggatcattaactgtgaatgatcggtgatcctggaccgtataagctgggatcagaatgaggggttatacacaactcaaaaactgaacaacagttgttctttggataactaccggttgatccaagcttcctgacagagttatccacagtagatcgcacgatctgtatacttatttgagtaaattaacccagcttcccagccattcttctgccggatcttccggaatgtcgtgatcaagaatgttgatcttcagtgtttcgcctgtctgttttgcaccggaatttttgagttctgcctcgagtttatcgatagccccacaaaaggtgtcatattcacgactgccaataccgattgcgccaaagcggactgcagaaagatcgggcttctgttcctgcaatgcttcatagaaaggagaaaggttgtccggaatatctccggcaccgtgggtggagctgataaccagccagatcccactggcaggtaaatcttctaacagcggaccgtgcagcgtttcggtggtaaaacccgcctcttccagcttttcagccaggtgttctgctacatattcggcaccgccgagggtgctgccgctgataagagtgatatctgccataaaccgccacctttattaagagtggcgtattgtacgctgtgaacgcgttgggatctacctgtggaaaagtatgggattaaaaaagccgatcagggcttgatggtacgcatgatcgggttttgcaggacgatcaatgtctcggtggactgaatttcatcaattgtttggatcttgttgataagtacatgctggagagcgtcgatgctacggcacatcacttttataaagatgctgtagtggccggttgtgtaataggcttcagtgacttcatcaaggctttccagctttgccagcgcggaagggtagtctttggcgctctttaatataatgccgataaagcagcctacgtcataaccgagctgcttcgggctgacatcaatacgcgccccggtaatgatccccgcctgcttcattttctctactcgaacgtgaatcgtccccggactgacgccaaattgtttcgccagttcggcgtaagcggtgcgcgcattgcccattaatgcttccaggatgccacggtccagattgtcgatcagataattttccataggattttcttatgcggattgatgattcattctattttagccttcttttttaatgaatcaaaagtgagttaggctttttattgaatgattattgcatgtgtgtcggtttttgttgcttaatcataagcaacaggacgcaggagtataaaaaatgaaaaccgcttacattgccaaacaacgtcaaattagcttcgtgaaatctcacttttctcgtcaactggaagaacgtctggggctgatcgaagtccaggcgccgattcttagccgtgtgggggatggcacgcaggataacttgagcggctgtgaaaaagcggtgcaggtaaaagtgaaagctctgcctgatgcccagttcgaagtggttcatagtctggcgaagtggaaacgtcagaccttagggcaacacgacttcagcgcgggcgaagggctgtacacgcacatgaaagcccttcgccccgatgaagaccgtctttctccgttgcacagcgtctatgttgaccagtgggactgggaacgcgtaatgggcgacggtgagcgtcaattcagcactctgaaaagcacggtagaggcgatctgggcgggaattaaagcaaccgaagctgcggttagcgaagagtttggcctggcaccgttcctgccggatcagatccacttcgtacacagccaggagttactgtctcgttatccggatcttgatgccaaagggcgtgagcgggcgatagcgaaagatcttggcgcggtattccttgtcgggattggcggcaagctgagcgatggtcatcgccacgacgtgcgcgcaccggattatgatgactggagcaccccgagtgagctgggccatgcgggtctgaacggcgatattctggtgtggaacccggtactggaagatgcgtttgagctttcctccatggggatccgtgtagatgccgacacgctgaagcatcaactggcgctgaccggtgacgaagatcgcctggagctggagtggcatcaggcgctgctgcgcggtgaaatgccgcagaccatcggcggcggtatcggccagtctcgtttgactatgctgctgctgcaactgccgcatatcggccaggttcagtgtggagtatggccagctgctgttcgcgagagcgtcccttctctgctgtaataatttatcgccgccagcgtctgagcaggcggcttcgcatcccggtatcaaagcgccagatatgatcgaaaatgcgcatgatgccgggtttgccgtgtgcgctcatcgccacggcatgaaagcgatgctgatgtacccgctgcagctctttcactttactcgtcacgtcgtcaggcaaccgctgagcgataaaatcagaaatcaccaccgcatcggcatcaaaccattccctgctttgcaagcgttccataatggcgcgaaaacaactggcaagatcggtgccgccacgaaactgctggcttaaaaaacggattgcttgttcgatgccttgtgggccactaagctcataacggacgatctcggtggaaaatagcataatatagcagcgccggttttctgcgagagcaatgcgcatcaaggccaggcagaacgctttcgcacactgttcattaaagccgcccatactgccggaagtatccacacagacaataaacggcccgcgcggctgttcatcgtaatctttatgtaccaccggacgttcgatcactttttcacgccagctctcaccgtgcaggcgataggtgagcaactgtttttccaccagccgacggtaaaactcatactccagttccgttatccctagtgtcgccagttctggcggcaggagacgtaaaatatcatcgctttgttgcagaccatcaacctgctcaggaaccgtcgccggttcgcgcaccatggtgcggaaggtttccatctgcgcatcgttgcgcggtatacttttggcttcccgagaacgccccagctgctctgccaggcgtttcagttccggctgttcgttaagaaattcaccgtatttcacaatcaactgatagtcgccacgtttaagctgaccggcgctcatatcccacagacgaccagctgcagtattgttatctgcgagaatcggttcaagttgtccgctcagcgtcatgcgttcctgaacttcactcaacagttgttcgcgttcttcttctaatagctgttgatttaacgtcgttgcttgcacgatcagacttaaacgccaacgctggagaaaaagcgtgtgtaacgcactagtgatcgtgctgttagcatcaaccaactgtcgggcttgttctgcccatggagaattcagacgatgcagtaagtccaggatctgtggtagctgcacaataaactgtggcgtggagaggagctggctttgctgatagcacatcacctcttcggtgagttccggcgggactcgggcatctttcagccgactgcgcagcgcttcacgccagcggggaacatcatcagtgattgccgccttcaggcgtgggaatttttcaaagaagaccgccagctgcggactggccagcagtgcgatgatcatctcttcgatcaatccctcttcgctgacggccagcatcacattaagcgtatccagcgttagcattgttgtgcctggcgaatctgtgcaccgacatcctgtaggctggcttcaatgcgacctaaccagtcgccagggataaacagacatttttgctgttcgctgaataaagcgtgttgcttgcgccagtcgctttcaagctcttccagttgttgttttatttcaccaggcagaccttcagcgctactaccgggaagtgccagcgtactgccttgtaaacttacatcgcgaacgacaagatgttgggcgctatcaacttccagattcagtttctgggcaaagccgataccgttcagtttaccgcgaatttcaccacctttgctcagccactgttccagcgcgctacgctcaaaggagatatgaaccacttccatatcatgcagttttaacggtttttgcagcagtagagtcagagtggaagcagtaacgttaacaggaagttgatactgctgacgacggctgaaaatgccgcccagacgaattaccgttaaggctgttttatcgctttgttgctgctggagttgcaggtgacgttgcacaatcgcgccaaggcgagtcaacatcccttgctgttgccaggcgtgaccggtcatcaatacatcaatttgttgttgtatcaaattcaggctttgcgcgtcataccacaggcaatctttcagcaaaatgagatctaccggggcaacagcactgcgaccgctaaaaaaggcgctggcctgcaataatcggatcgcttttttccagcgacgatcgctgacataaggcgcatccggtaatttatccagttgctggcgcagcataaaaatcagctcaaatacatgatcgggcagcgtaatttcaccaatctctttctgccagcgttcatattcttcatctgtgacctgcaaggcatcaggaaccggattgtcgttttcatcctgttgactggtcagcatggagcggaaattcgctttatcctgcactttatctaaccacagacgaatcagcatgcggtcatataacgcttccagactgctgtctgcttccggcagctcgttggaggccgccaccagcagacgcatcgggattttttctacgtgtgcaccgttgcggaactggcgctcgttaatggcggtgagcaaggtattaagaattgccgggcccgctttccagatctcatccagaaagacaatttctgcttccggcaggtaaccgctggttaaacgttcatagcgcccttcatcttttagcgcctgaatagaaaggggaccaaaaacttcttccggcgtggagaagcgggtcatcagatattcaaacgcgcgggcattctgaaaggcgaattttaagcgccgggcgatcaaacttttggcaatacctggcgggccaaggaggaacacactttcaccacttaatgccgctaataaacacaagcggatggcgtggctacgttcataaagccccttttccaagctactgctcaggcgggaaattctttccgctaataaatgagggtgagccataatgaagtggcgtcctttcgtcaaaagttctgcgtaaattgcgagtatagacgtttcttgctggtggctaaaatagtctcaaagggggggtatttttctttgagccaggttaatgtggccgcatttaggagtacgattttgccgttaatcgtgcatactgtgcgcttttttgtgggccaagggactaagcacacatttcatatttcaacgaaagactagtctatgagcactgataataagcaaagtttgcccgcgattaccctcgcggcgattggagttgtctacggcgatattggtaccagcccgttatatacacttcgtgaatgtttgtccggccagtttggttttggcgttgaacgcgatgccgtgtttggctttttaagcctgatcttctggctgctaatctttgtggtttccattaaatatctcaccttcgtgatgcgggcagataacgccggtgagggggggatcctgacgttgatgagccttgccgggcgtaatacgagcgcgcgaaccacaagtatgctggtgattatggggctaatcggcggcagctttttttatggtgaagtcgtcataacacccgctattagcgtgatgagtgccattgaaggtctggaaatcgtcgccccgcagctggatacctggatagttcccctcagtattatcgttctcactttattatttatgattcaaaaacatggcacggctatggtcggtaagctgtttgcgccgatcatgctgacctggtttttgattctggcaggactggggttacgtagcattattgctaacccggaagtgctgcatgcgctgaatccaatgtgggcggtgcatttcttccttgaatacaaaacggtttcttttattgcattaggggcagtggtgttgagcattacgggggtcgaggcgctgtatgctgatatggggcactttggtaagttccctattcgcctggcgtggttcaccgtcgtattaccttccttgacccttaattacttcggtcagggagcgctgttgttaaagaacccggaagcgattaagaacccgttcttcctgttggcaccggactgggcgctgatcccgctgctgatcatcgccgcactggcgacggtaattgccagccaggcggttatctctggcgtcttcagtttgacgcgtcaggcggtacgtctgggatatttgagcccgatgcgcattattcacacctccgaaatggagagtgggcaaatctatattccgtttgtgaactggatgctctatgtcgcggtcgtgattgtgattgtcagctttgagcactccagcaacctggcggcggcgtacgggattgcggtgaccggaaccatggtgctgacgtctattctcagcactaccgtggcacgtcagaactggcactggaataagtattttgttgcgctgatcctgattgctttcctttgtgtcgatattccattgttcaccgctaacctcgataaactgctctccggcggctggttgccattgagcctcggtactgtgatgtttatcgtgatgaccacctggaagagcgagcgtttccgcttgctgcggcggatgcatgaacatggtaactctctggaagcgatgattgctagcctggagaaaagtccgcctgttcgcgtgcccgggaccgcggtgtatatgagccgtgcaatcaacgtcattccctttgcgctgatgcataaccttaaacataacaaggtattgcatgagcgggtgattctgttaactctgcgcaccgaagacgctccatatgtccataacgtccgtcgggtacagattgaacaactgagccccactttctggcgcgtggtggcaagttatggttggcgagaaacgccaaacgtagaagaagttttccaccgctgcggtctggaaggattaagttgccggatgatggaaacctccttctttatgagccatgagagcttgatcctcggcaaacgcccgtggtatttgcgtctgcgcggcaagctgtacttgctgctgcaacgtaatgcgctgcgtgcaccagatcaatttgaaatcccgccaaacagggttatcgaactgggtactcaggtcgaaatctaacgccagacgcctcctttcttcataagggggcgtttttgttttcatggttaatcaccatgtaaaacgtttcgaggttgatcacatttccgtaacgtcacgatggttttcccaactcagtcaggattaaactgtgggtcagcgaaacgtttcgctgatggagaaaaaaatgaaaaaaggcaccgttcttaattctgatattagtagcgtgatctcccgtctgggacataccgatacgctggtggtgtgtgatgctggtttacccatccccaaaagtacaacgcgtatcgatatggcattaacccagggtgtaccttcttttatgcaggtgctgggcgtcgtcacaaatgaaatgcaggtcgaggcggccattatcgcggaagagatcaaacaccataatccgcaactccacgaaacgttgctcactcaccttgagcagctgcaaaaacaccagggaaataccattgaaattcgttacaccacgcatgaacaattcaaacaacaaaccgcagaaagtcaggcggtaattcgcagcggagaatgttctccgtatgcgaatatcattctctgtgctggcgtgacgttctgaggccgtcatggaagcattacttcagcttaaaggcatcgataaagccttcccgggcgtaaaagccctcagcggcgcagcgttaaatgtctatccgggccgcgtgatggcgctggtgggcgaaaacggcgcgggtaaatccaccatgatgaaagtgcttactggcatctatactcgcgatgccggtacgcttttatggctggggaaagaaacgacatttaccgggccaaaatcttcccaggaagccgggattgggattatccatcaggaactgaacctgatcccgcagttgaccattgccgaaaacattttcctcggtcgtgagtttgttaatcgctttggcaaaattgactggaaaaccatgtatgccgaagcggataaattgctggctaaacttaacctgcgctttaaaagcgacaagctggtgggcgatctttccatcggtgaccagcaaatggttgaaatcgccaaagtgctgagctttgagagcaaagtcatcattatggatgaaccgaccgatgcgctgaccgataccgaaaccgaatccctgttccgcgtcatccgcgagctgaaaagccaaggccgcggtattgtctatatctcccaccgcatgaaagaaatcttcgagatttgcgatgacgttaccgtttttcgtgatgggcaatttattgctgagcgcgaagtggcaagtctgaccgaagatagcctgattgagatgatggtgggtcgcaagctggaagatcaatatccgcacctggacaaagcgccgggagatatccgcctgaaagtcgataatctctgcggacctggcgttaacgatgtctcttttactttacgcaaaggcgaaattcttggcgtctctggtttgatgggcgcaggtcgtaccgaactgatgaaagtgctctacggcgcactaccgcgcaccagcggttacgtcaccctggatgggcatgaagtcgttacccgtagtccgcaggatggcctggcaaacggcattgtgtatatctccgaagaccgtaaacgtgacggtttagtgttgggcatgagtgtaaaagagaacatgagcctgacagcgctgcgctacttcagccgcgctggcggcagtttgaagcatgccgatgaacagcaggctgtgagtgatttcattcgtctgtttaatgtgaaaactccgagcatggaacaggcaattggtctgctttccggtggcaatcagcaaaaagtggcgattgcccgcggtctgatgacacgccccaaagtgttgatccttgatgaacctacccgtggcgtagatgtcggcgcgaaaaaagagatctatcaactgattaaccagttcaaagccgatggcttgagcatcattctggtgagtagcgagatgccagaagtattaggcatgagcgatcgcatcatcgtcatgcatgaagggcatctcagcggggaatttactcgtgagcaggccacccaggaagtgttaatggctgccgctgtgggcaagcttaatcgcgtgaatcaggagtaaaaaaatgacaacccagactgtctctggtcgccgttatttcacgaaagcgtggctgatggagcagaaaagccttatcgctctgctggtgctgatcgcgattgtcagcacgttaagcccgaactttttcaccatcaataacttattcaatattctccagcaaaccagtgtgaacgccattatggcggtcgggatgacgctggtgatcctgacgagcggcatcgacttaagcgtaggttctctgttggcgctgaccggcgcagttgctgcatctatcgtcggcattgaagtcaatgcgctggtggctgtcgctgctgctctcgcgttaggtgccgcaattggtgcggtaaccggggtgattgtagcgaaaggtcgcgtccaggcgtttatcgctacgctggttatgatgcttttactgcgcggcgtgaccatggtttataccaacggtagcccagtgaataccggctttactgagaacgccgatctgtttggctggtttggtattggtcgtccgctgggcgtaccgacgccagtctggatcatggggattgtcttcctcgcggcctggtacatgctgcatcacacgcgtctggggcgttacatctacgcgctgggcggcaacgaagcggcaacgcgtctttctggtatcaacgtcaataaaatcaaaatcatcgtctattctctttgtggtctgctggcaagcctggccgggatcattgaagtggcgcgtctctcctccgcacaacccacggcggggactggctatgagctggatgctattgctgcggtggttctgggcggtacgagtctggcgggcggaaaaggtcgcattgttgggacgttgatcggcgcattaattcttggcttccttaataatggattgaatttgttaggtgtttcctcctattaccagatgatcgtcaaagcggtggtgattttgctggcggtgctggtagacaacaaaaagcagtaataacgactacaggacatcttgaatatgaacatgaaaaaactggctaccctggtttccgctgttgcgctaagcgccaccgtcagtgcgaatgcgatggcaaaagacaccatcgcgctggtggtctccacgcttaacaacccgttctttgtaagcctgaaagatggcgcgcagaaagaggcggataaacttggctataacctggtggtgctggactcccagaacaacccggcgaaagagctggcgaacgtgcaggacttaaccgttcgcggcacaaaaattctgctgattaacccgaccgactccgacgcagtgggtaatgctgtgaagatggctaaccaggcgaacatcccggttatcactcttgaccgccaggcaacgaaaggtgaagtggtgagccacattgcttctgataacgtactgggcggcaaaatcgctggtgattacatcgcgaagaaagcgggtgaaggtgccaaagttatcgagctgcaaggcattgctggtacatccgcagcccgtgaacgtggcgaaggcttccagcaggccgttgctgctcacaagtttaatgttcttgccagccagccagcagattttgatcgcattaaaggtttgaacgtaatgcagaacctgttgaccgctcatccggatgttcaggctgtattcgcgcagaatgatgaaatggcgctgggcgcgctgcgcgcactgcaaactgccggtaaaagcgatgtgatggtcgtcggatttgacggtacaccggatggcgaaaaagcggtgaatgatggcaaactagcagcgactatcgctcagctacccgatcagattggcgcgaaaggcgtcgaaaccgcagataaagtgctgaaaggcgagaaagttcaggctaagtatccggttgatctgaaactggttgttaagcagtaattttaatcaggttgtatgacctgatggtgacataaatacgtcatcgacagatgaacgtgtaatataaagaaaagcagggcacgcgccaccctaacacggtggcgcattttatggacatcccgaatatgcaaaacgcaggcagcctcgttgttcttggcagcattaatgctgaccacattcttaatcttcaatcttttcctactccaggcgaaaccgtaaccggtaaccactatcaggttgcatttggcggcaaaggcgcgaatcaggctgtggctgctgggcgtagcggtgcgaatatcgcgtttattgcctgtacgggtgatgacagcattggtgagagcgttcgccagcagctcgccactgataacattgatattactccggtcagcgtgatcaaaggcgaaagtacaggtgtggcgctgatttttgttaatggcgaaggtgagaatgtcatcggtattcatgccggcgctaatgctgccctttccccggcgctggtggaagcgcaacgtgagcgtattgccaacgcgagtgcattattaatgcagctggaaagtccactcgaaagtgtgatggcagcggcgaaaatcgcccatcaaaataagactatcgttgcgcttaacccggctccggctcgcgaacttcctgacgaactgctggcgctggtggacattattacgccaaacgaaacggaagcagaaaagctcaccggtattcgtgttgaaaatgatgaagatgcagcgaaggcggcgcaggtactgcatgaaaaaggtatccgtactgtactgattactttaggaagtcgtggtgtatgggctagcgtgaatggtgaaggtcagcgcgttcctggattccgggtgcaggctgtcgataccattgctgccggagatacctttaacggtgcgttaatcacggcattgctggaagaaaaaccattgccagaggcgattcgttttgcccatgctgccgctgcgattgccgtaacacgtaaaggcgcacaaccttccgtaccgtggcgtgaagagatcgacgcatttttagacaggcagaggtgacgcttggctacaatgaaagatgttgcccgcctggcgggcgtttctaccagtacagtttctcacgttatcaataaagatcgcttcgtcagtgaagcgattaccgccaaagttgaagcggcgattaaagaactcaattacgcgccaagtgctctggcgcgtagcctcaaactcaatcaaacacataccattggcatgttgatcactgccagtaccaatcctttctatagtgaactggtgcgtggcgttgaacgcagctgcttcgaacgcggttatagtctcgtcctttgcaataccgaaggcgatgaacagcggatgaatcgcaatctggaaacgctgatgcaaaaacgcgttgatggcttgctgttactgtgcaccgaaacgcatcaacctagccgtgaaatcatgcaacgttatccgacagtgcctactgtgatgatggactgggctccgttcgatggcgacagcgatcttattcaggataacagcttgctgggcggagacttagcaacgcaatatctgatcgataaaggtcatacccgtatcgcctgtattaccggcccgctggataaaactccggcgcgcctgcggttggaaggttatcgggcggcgatgaaacgtgcgggtctcaacattcctgatggctatgaagtcactggtgattttgaatttaacggcgggtttgacgctatgcgccaactgctaagtcatccgctgcgtcctcaggccgtctttaccggaaatgacgctatggctgttggcgtttaccaggcgttatatcaggcagagttacaggttccgcaggatatcgcggtgattggctatgacgatatcgaactggcaagctttatgacgccaccattaaccactatccaccaaccgaaagatgaactgggggagctggcgattgatgtactcatccatcggataacccagccgacccttcagcaacaacgattacaacttactccgattctgatggaacgcggtagcgcttaattactcgctttcacttggaacgcggttcggcttagatttacgctgtcttttgatcaaattattaccatcggttgttttcagaagcatgaacattgctgcactagcaacagtaataatgcccattgtgataaacgtatagtggaattgttcgacagtcgttgtgccttccattccttcataaacgcgaaggacggccgcacttacagcaacgcctaaactaatgctcagttgctgcgtgaccgccagaacactgttaccgctgctggcattgtcatcggtcagatcggcaagtgtgatggtattcatcgcggtaaactgcgtgctcatagccatccctaatataaacaacggcaagatcagcatccatatagccattgctggactttgcaaagagaactgagcgatcattagcccaataatcaccgtgatccccactaacgtatggcgatagcccagacgacgtaagacttgggtaaccatgctttttgcaataatggaacctaacgctgtcggtgccatcatacagccagcaataaacgcctgataaccaaatcctacctgtaacatcaatggcataaggaacggtacacagccggtccccagacgggttgcaatattgcctacgataccgatgctgaaagtgcgggttttaaataaatctaaactaattaatgggtttggcgtgcgtcgtgcatggagaatatagagaagcagtaacccgatgctggtgacaattaccgtcaaggcaatccagctggcgacaatcttttccccgaatagctctattccgctactgaagagaacaaggctgaggccaaacagcaaaaagccagtgatatcgaatctgcgtcgtgcggtggtgaaattgggcatatgtttgcgcgcgtaaagaaggcccgcaatacctatggggatattgattaaaaatatccagtgccaggttgcccaggtgaccagcacgccgccaagaacggggcctaaaattggccccaccagacccggcatggcgacaaaattcaatactggaagaagttcattacgaggataagcgcgcagtaaggccagccgagcaacaggcatcatcattgcgccgcctatcccctgaataacccggaagacaaccagctgtggtaggctattagaaagtgcgcaggccagagaacccaatgtgaacagactcacggcaagggtaaaaatgcgacgcgtaccgaagcgatcggctagccatccgcttaccggaataagcatcgccaccgtcagcgtataactgatgatggcactttgcatcgcgagaggagaacgattaaggctatgagcgattgcgggtaaggcggtattaagaatagtggcatcaagtgcctgcatgaagaaggccatcgccgcgatccacggcaaacccgccatactgcgcttctttttatcgctcattcaatgtcctgttatcgggttatcacttatcaggactgcgtagcagcgcctgacaagctttaaatgccgcgtcgccatcgctttggataatcgcatcgacaatcgcctgatgcagatccagctttatcactgtgtcgctggtaatactcgtgaagtaagtgtgataaacgctatggaataggctggcgaaactggtcaaaaacggattggcgctcatttcatagatatgctcatgccaggccatatcgacttcgatccagcgttcacggcgaaagttctcttttaatgccgccatttcggccattaacgtattgagatgcgctttctgttccgcggtgccaaccgttgctgccagtaggcaggcttgcggctccagacagatacgcataaccagaaagtgatcgatgacctgatgaaagttctcttctgtcatccaccaggtaagcaattcctgatcaagaaaattccagttgctttgtggcatgacccgagtaccaattcgcggtcgcggtaaaaccatcccttttgccgttaacgttttgaccgcttcgcgtaccgctgtacgactcactccaaattgctcgcccagctcaatctcaccgggcaaaatggtgccgggttcatattcaccttttaagatccgttgcgccagcttctcagccagaacatagctaaggtttttctgtgcagctaactgttgtgcgcttaaaggcattacttatcttcctttttctttttattcctccttagtatgccaccaggaagtgtgattacggttgcaaaaacggcaaattgcttgttttatggcacattaacggggcttttgctgaaaaaatgcgcggtcagaaaattattttaaatttcctcttgtcaggccggaataactccctataatgcgccaccactgacacggaacaacggcaaacacgccgccgggtcagcggggttctcctgagaactccggcagagaaagcaaaaataaatgcttgactctgtagcgggaaggcgtattatgcacaccccgcgccgctgagaaaaagcgaagcggcactgctctttaacaatttatcagacaatctgtgtgggcactcgaagatacggattcttaacgtcgcaagacgaaaaatgaataccaagtctcaagagtgaacacgtaattcattacgaagtttaattctttgagcgtcaaacttttaaattgaagagtttgatcatggctcagattgaacgctggcggcaggcctaacacatgcaagtcgaacggtaacaggaagaagcttgcttctttgctgacgagtggcggacgggtgagtaatgtctgggaaactgcctgatggagggggataactactggaaacggtagctaataccgcataacgtcgcaagaccaaagagggggaccttcgggcctcttgccatcggatgtgcccagatgggattagctagtaggtggggtaacggctcacctaggcgacgatccctagctggtctgagaggatgaccagccacactggaactgagacacggtccagactcctacgggaggcagcagtggggaatattgcacaatgggcgcaagcctgatgcagccatgccgcgtgtatgaagaaggccttcgggttgtaaagtactttcagcggggaggaagggagtaaagttaatacctttgctcattgacgttacccgcagaagaagcaccggctaactccgtgccagcagccgcggtaatacggagggtgcaagcgttaatcggaattactgggcgtaaagcgcacgcaggcggtttgttaagtcagatgtgaaatccccgggctcaacctgggaactgcatctgatactggcaagcttgagtctcgtagaggggggtagaattccaggtgtagcggtgaaatgcgtagagatctggaggaataccggtggcgaaggcggccccctggacgaagactgacgctcaggtgcgaaagcgtggggagcaaacaggattagataccctggtagtccacgccgtaaacgatgtcgacttggaggttgtgcccttgaggcgtggcttccggagctaacgcgttaagtcgaccgcctggggagtacggccgcaaggttaaaactcaaatgaattgacgggggcccgcacaagcggtggagcatgtggtttaattcgatgcaacgcgaagaaccttacctggtcttgacatccacggaagttttcagagatgagaatgtgccttcgggaaccgtgagacaggtgctgcatggctgtcgtcagctcgtgttgtgaaatgttgggttaagtcccgcaacgagcgcaacccttatcctttgttgccagcggtccggccgggaactcaaaggagactgccagtgataaactggaggaaggtggggatgacgtcaagtcatcatggcccttacgaccagggctacacacgtgctacaatggcgcatacaaagagaagcgacctcgcgagagcaagcggacctcataaagtgcgtcgtagtccggattggagtctgcaactcgactccatgaagtcggaatcgctagtaatcgtggatcagaatgccacggtgaatacgttcccgggccttgtacacaccgcccgtcacaccatgggagtgggttgcaaaagaagtaggtagcttaaccttcgggagggcgcttaccactttgtgattcatgactggggtgaagtcgtaacaaggtaaccgtaggggaacctgcggttggatcacctccttaccttaaagaagcgtactttgtagtgctcacacagattgtctgatagaaagtgaaaagcaaggcgtttacgcgttgggagtgaggctgaagagaataaggccgttcgctttctattaatgaaagctcaccctacacgaaaatatcacgcaacgcgtgataagcaattttcgtgtccccttcgtctagaggcccaggacaccgccctttcacggcggtaacaggggttcgaatcccctaggggacgccacttgctggtttgtgagtgaaagtcgccgaccttaatatctcaaaactcatcttcgggtgatgtttgagatatttgctctttaaaaatctggatcaagctgaaaattgaaacactgaacaacgaaagttgttcgtgagtctctcaaattttcgcaacacgatgatgaatcgaaagaaacatcttcgggttgtgaggttaagcgactaagcgtacacggtggatgccctggcagtcagaggcgatgaaggacgtgctaatctgcgataagcgtcggtaaggtgatatgaaccgttataaccggcgatttccgaatggggaaacccagtgtgtttcgacacactatcattaactgaatccataggttaatgaggcgaaccgggggaactgaaacatctaagtaccccgaggaaaagaaatcaaccgagattcccccagtagcggcgagcgaacggggagcagcccagagcctgaatcagtatgtgtgttagtggaagcgtctggaaaggcgcgcgatacagggtgacagccccgtacacaaaaatgcacatattgtgagctcgatgagtagggcgggacacgtggtatcctgtctgaatatggggggaccatcctccaaggctaaatactcctgactgaccgatagtgaaccagtaccgtgagggaaaggcgaaaagaaccccggcgaggggagtgaaaaagaacctgaaaccgtgtacgtacaagcagtgggagcacgcttaggcgtgtgactgcgtaccttttgtataatgggtcagcgacttatattctgtagcaaggttaaccgaataggggagccgaagggaaaccgagtcttaactgggcgttaagttgcagggtatagacccgaaacccggtgatctagccatgggcaggttgaaggttgggtaacactaactggaggaccgaaccgactaatgttgaaaaattagcggatgacttgtggctgggggtgaaaggccaatcaaaccgggagatagctggttctccccgaaagctatttaggtagcgcctcgtgaattcatctccgggggtagagcactgtttcggcaagggggtcatcccgacttaccaacccgatgcaaactgcgaataccggagaatgttatcacgggagacacacggcgggtgctaacgtccgtcgtgaagagggaaacaacccagaccgccagctaaggtcccaaagtcatggttaagtgggaaacgatgtgggaaggcccagacagccaggatgttggcttagaagcagccatcatttaaagaaagcgtaatagctcactggtcgagtcggcctgcgcggaagatgtaacggggctaaaccatgcaccgaagctgcggcagcgacgcttatgcgttgttgggtaggggagcgttctgtaagcctgcgaaggtgtgctgtgaggcatgctggaggtatcagaagtgcgaatgctgacataagtaacgataaagcgggtgaaaagcccgctcgccggaagaccaagggttcctgtccaacgttaatcggggcagggtgagtcgacccctaaggcgaggccgaaaggcgtagtcgatgggaaacaggttaatattcctgtacttggtgttactgcgaaggggggacggagaaggctatgttggccgggcgacggttgtcccggtttaagcgtgtaggctggttttccaggcaaatccggaaaatcaaggctgaggcgtgatgacgaggcactacggtgctgaagcaacaaatgccctgcttccaggaaaagcctctaagcatcaggtaacatcaaatcgtaccccaaaccgacacaggtggtcaggtagagaataccaaggcgcttgagagaactcgggtgaaggaactaggcaaaatggtgccgtaacttcgggagaaggcacgctgatatgtaggtgaagcgacttgctcgtggagctgaaatcagtcgaagataccagctggctgcaactgtttattaaaaacacagcactgtgcaaacacgaaagtggacgtatacggtgtgacgcctgcccggtgccggaaggttaattgatggggtcagcgcaagcgaagctcttgatcgaagccccggtaaacggcggccgtaactataacggtcctaaggtagcgaaattccttgtcgggtaagttccgacctgcacgaatggcgtaatgatggccaggctgtctccacccgagactcagtgaaattgaactcgctgtgaagatgcagtgtacccgcggcaagacggaaagaccccgtgaacctttactatagcttgacactgaacattgagccttgatgtgtaggataggtgggaggctttgaagtgtggacgccagtctgcatggagccgaccttgaaataccaccctttaatgtttgatgttctaacgtggacccgtgatccgggttgcggacagtgtctggtgggtagtttgactggggcggtctcctcctaaagagtaacggaggagcacgaaggttggctaatcctggtcggacatcaggaggttagtgcaatggcataagccagcttgactgcgagcgtgacggcgcgagcaggtgcgaaagcaggtcatagtgatccggtggttctgaatggaagggccatcgctcaacggataaaaggtactccggggataacaggctgataccgcccaagagttcatatcgacggcggtgtttggcacctcgatgtcggctcatcacatcctggagctgaagtaggtcccaagggtatggctgttcgccatttaaagtggtacgcgagctgggtttagaacgtcgtgagacagttcggtccctatctgccgtgggcgctggagaactgaggggggctgctcctagtacgagaggaccggagtggacgcatcactggtgttcgggttgtcatgccaatggcactgcccggtagctaaatgcggaagagataagtgctgaaagcatctaagcacgaaacttgccccgagatgagttctccctgactccttgagagtcctgaaggaacgttgaagacgacgacgttgataggccgggtgtgtaagcgcagcgatgcgttgagctaaccggtactaatgaaccgtgaggcttaaccttacaacgccgaagctgttttggcggatgagagaagattttcagcctgatacagattaaatcagaacgcagaagcggtctgataaaacagaatttgcctggcggccgtagcgcggtggtcccacctgaccccatgccgaactcagaagtgaaacgccgtagcgccgatggtagtgtggggtctccccatgcgagagtagggaactgccaggcatcaaattaagcagtaagccggtcataaaaccggtggttgtaaaagaattcggtggagcggtagttcagtcggttagaatacctgcctgtcacgcagggggtcgcgggttcgagtcccgtccgttccgccaccctaattaggggcgtagttcaattggtagagcaccggtctccaaaaccgggtgttgggagttcgagtctctccgcccctgccagaaatcatccttagcgaaagctaaggattttttttatctgaaataaccctctccgaagtaaatccttctaccggcatccttgccagccattcatattaatacacttcatccagcacgttaattttcaaaagatcgcgaatcaacgcatttttatcgctattttgcagccatatggcataaagcggccgactaagtgttgtgctatcgacaacggtatgcaggccgccttttttacgcgcccagctgacgggtagccaggtgcaaccattaagcatcgcaatctgttgctgtgccagttcagcagaactggttgtcagaatgggcacttcgtcagcaccgatcaaacctgcctcatgctgttgaaaatctggcccccactcaagtcgcagataattaagatctccctttagtttactaggggcactggtataaagcgctaaagtgaaatatcccagcaactgactactaaattcgtccattttgggcgcttcagtggtaataagaagatcaagctggcgttcatgcagctgttttaccagagactgccgttgggcaattcgcgcttcgaactgtaagcctgtatgggcatcctgattttgatacaagcgtcccagccactgattaagcatacattcccacaagctggcgctggcaccgatagaaaactcgttatgtcgactggtatgcgccacctccttacgggcggcctgccaggtgctcatgagcgtttctgcataaggcagtagtttttcaccggcagcggttaaacggatattgtttctgtggcgggtgaaaaggttcacacccagttgattttccagttgtctgattcgaaagctcactgcactctgggtcagatagaggctttcagccgctcgaccaaagtgacgcgttcggctaacttccaggaaagtttttaacaattccgtatccacagtgctctccgcaaaattatttgtcgttatgatttaaatgttttgttttacactctgtcaagcgtaactaatactccgcgccataactagctcggtcaaagaattaggagcgtgcaggatggcggaaagctttacgacgactaatcgatatttcgacaataaacattatccacgtggattctctcgtcatggtgatttcaccatcaaagaggcacaactgcttgagcgtcatggttatgccttcaatgagttggatcttggcaaacgcgagccggttaccgaggaagagaaactcttcgtagcagtatgccgtggcgaacgtgagccagtgacagaagcagaacgcgtgtggtccaagtatatgacgcgtattaagcgtccaaaacgttttcacaccctttccggcggtaaaccgcaggttgaaggtgctgaagactacaccgattctgacgattaataaaaagggcgaaatgccctttttttatgtcagtagtttctgcagatggatgagcaaacggtcaatcgctcgatagctaactgcctcctgcaaatgctgacgtgtgataatgtcagactgatcaatatcagcaatggttcgtgcaactttcaataaccgctgccaggcacgaatgcttaaccccagatggatcagtgttccttccaaccacatcgcatcttcgctctcaagtttgcagaattggcgtatttccggactatccagccaggcattcagtttattctgccgcttaaattggcgctctctggcggccattacgcgttgtttaacggtggcgctgctttctcccggcactaccgttttactcaaaatgccggggggtggtaatgggatctccagactgagatcgaagcggtcgagaaagggcccgctgagccggttgagataacgtaatgtctgttctggcgtgcagcggttatggtttccctgataatgtccggtagggctgggattcatcgccgcaacaagctggaaacgggctggataggttatttttgctcgtgtgcgactaagatggatctgcccggattcaatcggctctcgcaaggcatccagtgtacgccgttcaaattcaggtagctcatcaagaaaaagcacgccgttatgcgccaggctaatttcaccgggccctggaattgcgccaccgcctaccatcgcagttaagcttgcactgtgatgaggactgcggaacgggcgctgccgccattgtttttgtacactttcagcatttaccagacttaatatcgcagcactctccagtgcctcttcattgcttaaatctggcaacaggccattaatacggctggcgagcattgttttacctgttcccggcggcccaatcagtaaaaggttgtgcccgccagcagcggtaatttccagtcctcgctttccttgttcctgaccgataacatcactgagatcatgttgtagcgcccgggatactgcatcagttggtttcgggcgttcgagagcgtgcttaccttccagaaacgcacagacagcttgcagatgatcggctatcaggcatccttcaccgttaattagccccacttcatcttcgttatctttcgcgacgataatttttctgccgctcttaatagcttcagttgcactggagattgcgccgggaacgccacgcagagcgcctgtaagcgccagttctccgactaattcatattcatctaacttattggctgtaagctgttcactggccgccagcaacgcaatggcgataggtaaatcatatcgtcccccttcttttggcagatcagctggagccaggttgatggtgatttttttcgccggatattcatatccgctattgataatggcgctgcgcacgcgatcgcgagcttcttttaccgttgtttctggtaagcccaccatcgttaagccgggtagacctttactgatatgtacctcaacagtgatcgggggcgcatttactcccagggctgcgcgggtatgaacaatactcagactcataagccctccttgagtcaccattatgtgcataagatatcgctgctgtagcccgctaattcgtgaattttagtggctgattcctgtttatttgtgcaagtgaagttgagttgttctggcggtggaatgatgctcgcaaaaatgcagcggacaaaggatgaactacgaggaagggaacaacattcatactgaaattgaatttttttcactcactattttatttttaaaaaacaacaatttatattgaaattattaaacgcatcataaaaatcggccaaaaaatatcttgtactatttacaaaacctatggtaactctttaggcattccttcgaacaagatgcaagaaaagacaaaatgacagcccttctacgagtgattagcctggtcgtgattagcgtggtggtgattattatcccaccgtgcggggctgcacttggacgaggaaaggcttaaagatcaagccttaacgaactaagacccccgcaccgaaaggtccgggggttttttttgaccttaaaaacataaccgaggagcagacaatgaataacagcacaaaattctgtttctcaagattcaggacggggaactaactatgaatggcgcacagtgggtggtacatgcgttgcgggcacagggtgtgaacaccgttttcggttatccgggtggcgcaattatgccggtttacgatgcattgtatgacggcggcgtggagcacttgctatgccgacatgagcagggtgcggcaatggcggctatcggttatgctcgtgctaccggcaaaactggcgtatgtatcgccacgtctggtccgggcgcaaccaacctgataaccgggcttgcggacgcactgttagattccatccctgttgttgccatcaccggtcaagtgtccgcaccgtttatcggcactgacgcatttcaggaagtggatgtcctgggattgtcgttagcctgtaccaagcacagctttctggtgcagtcgctggaagagttgccgcgcatcatggctgaagcattcgacgttgcctgctcaggtcgtcctggtccggttctggtcgatatcccaaaagatatccagttagccagcggtgacctggaaccgtggttcaccaccgttgaaaacgaagtgactttcccacatgccgaagttgagcaagcgcgccagatgctggcaaaagcgcaaaaaccgatgctgtacgttggcggtggcgtgggtatggcgcaggcagttccggctttgcgtgaatttctcgctgccacaaaaatgcctgccacctgtacgctgaaagggctgggcgcagtagaagcagattatccgtactatctgggcatgctggggatgcacggcaccaaagcggcaaacttcgcggtgcaggagtgtgacctgctgatcgccgtgggcgcacgttttgatgaccgggtgaccggcaaactgaacaccttcgcgccacacgccagtgttatccatatggatatcgacccggcagaaatgaacaagctgcgtcaggcacatgtggcattacaaggtgatttaaatgctctgttaccagcattacagcagccgttaaatcaatgactggcagcaacactgcgcgcagctgcgtgatgaacattcctggcgttacgaccatcccggtgacgctatctacgcgccgttgttgttaaaacaactgtcggatcgtaaacctgcggattgcgtcgtgaccacagatgtggggcagcaccagatgtgggctgcgcagcacatcgcccacactcgcccggaaaatttcatcacctccagcggtttaggtaccatgggttttggtttaccggcggcggttggcgcacaagtcgcgcgaccgaacgataccgttgtctgtatctccggtgacggctctttcatgatgaatgtgcaagagctgggcaccgtaaaacgcaagcagttaccgttgaaaatcgtcttactcgataaccaacggttagggatggttcgacaatggcagcaactgttttttcaggaacgatacagcgaaaccacccttactgataaccccgatttcctcatgttagccagcgccttcggcatccatggccaacacatcacccggaaagaccaggttgaagcggcactcgacaccatgctgaacagtgatgggccatacctgcttcatgtctcaatcgacgaacttgagaacgtctggccgctggtgccgcctggcgccagtaattcagaaatgttggagaaattatcatgatgcaacatcaggtcaatgtaagcgctcgcttcaatccagaaaccttagaacgtgttttacgcgtggtgcgtcatcgtggtttccacgtctgcagtatgaatatggccgccgccagcgatgcacaaaatataaatatcgaattgaccgttgccagcccacggagcgtcgacttactgtttagtcagttaaataaactggtggacgtcgcacacgttgccatctgccagagcacaaccacaagtcaacaaatccgcgcctgagcgcaaaaggaatataaaaatgaccacgaagaaagctgattacatttggttcaatggggagatggttcgctgggaagacgcgaaggtgcatgtgatgagccacgcgctgcactatggcactagcgtttttgaaggcatccgttgctacgacagccacaaaggaccggttgtattccgccatcgtgagcatatgcagcgtctgcatgactccgccaaaatctatcgcttcccggttagccagagcattgatgagctgatggaagcttgtcgtgacgtgatccgcaaaaacaatctcaccagcgcctatatccgtccgctgatcttcgtcggtgatgttggcatgggagtaaacccgccagcgggatacagtaccgacgtgattatcgctgctttcccgtggggagcgtatctgggcgcagaagcgctggagcaggggatcgatgcgatggtttcctcctggaaccgcgcagcaccaaacaccatcccgacggcggcaaaagccggtggtaactacctctcttccctgctggtgggtagcgaagcgcgccgccacggttatcaggaaggtatcgcgctggatgtgaacggttatatctctgaaggcgcaggcgaaaacctgtttgaagtgaaagatggtgtgctgttcaccccaccgttcacctcctccgcgctgccgggtattacccgtgatgccatcatcaaactggcgaaagagctgggaattgaagtacgtgagcaggtgctgagccgcgaatccctgtacctggcggatgaagtgtttatgtccggtacggcggcagaaatcacgccagtgcgcagcgtagacggtattcaggttggcgaaggccgttgtggcccggttaccaaacgcattcagcaagccttcttcggcctcttcactggcgaaaccgaagataaatggggctggttagatcaagttaatcaataaatacaaaaaatgggacggcacgcaccgtcccatttacgagacagacactgggagtaaataaagtatgcctaagtaccgttccgccaccaccactcatggtcgtaatatggcgggtgctcgtgcgctgtggcgcgccaccggaatgaccgacgccgatttcggtaagccgattatcgcggttgtgaacagcttcacccaatttgtaccgggtcacgtccatctgcgcgatctcggtaaactggtcgccgaacaaattgaagcggctggcggcgttgccaaagagttcaacaccattgcggtggatgatgggattgccatgggccacggggggatgctttatagtctgccatctcgcgaactgatcgctgattccgttgagtatatggtcaacgcccactgcgccgacgccatggtctgcatctctaactgcgacaaaatcaccccggggatgctgatggcttccctgcgcctgaatattccggtgatctttgtttccggcggcccgatggaggccgggaaaaccaaactttccgatcagatcatcaagctcgatctggttgatgcgatgatccagggcgcagacccgaaagtatctgactcccagagcgatcaggttgaacgttccgcgtgtccgacctgcggttcctgctccgggatgtttaccgctaacagtatgaactgcctgaccgaagcgctgggcctgagccagccgggcaacggcagcctgctggcaacccacgccgaccgtaagcagctgttccttaatgctggtaaacgcattgttgaattgaccaaacgttattacgagcaaaacgacgaaagtgcactgccgcgtaatatcgccagtaaggcggcgtttgaaaacgccatgacgctggatatcgcgatgggtggaagcactaacaccgtacttcacctgctggcggcggcgcaggaagcggaaatcgacttcaccatgagtgatatcgataagctttcccgcaaggttccacagctgtgtaaagttgcgccgagcacccagaaataccatatggaagatgttcaccgtgctggtggtgttatcggtattctcggcgaactggatcgcgcggggttactgaaccgtgatgtgaaaaacgtacttggcctgacgttgccgcaaacgctggaacaatacgacgttatgctgacccaggatgacgcggtaaaaaatatgttccgcgcaggtcctgcaggcattcgtaccacacaggcattcagccaagattgccgttgggatacgctggacgacgatcgcgccaatggctgtatccgcagcctggaacacgcctacagcaaagacggcggcctggcggtgctctacggtaactttgcggaaaacggctgcatcgtgaaaacggcaggcgtcgatgacagcatcctcaaattcaccggcccggcgaaagtgtacgaaagccaggacgatgcggtagaagcgattctcggcggtaaagttgtcgccggagatgtggtagtaattcgctatgaaggcccgaaaggcggtccggggatgcaggaaatgctctacccaaccagcttcctgaaaagtatgggtctcggcaaagcctgtgcgctgatcaccgacggtcgtttctctggtggcacctctggtctttccatcggccacgtcagtccggaagcggcaagcggcggcagcattggcctgattgaagatggtgacctgatcgctatcgacatcccgaaccgtggcattcagttacaggtaagcgatgccgaactggcggcgcgtcgtgaagcgcaggacgctcgaggtgacaaagcctggacgccgaaaaatcgtgaacgtcaggtctcctttgccctgcgtgcttatgccagcctggcaaccagcgccgacaaaggcgcggtgcgcgataaaagcaaactggggggttaataatggctgacagccaacccctgtccggtgctccggaaggtgccgaatatttaagagcagtgctgcgcgcgccggtttacgaggcggcgcaggttacgccgctacaaaaaatggaaaaactgagcagccgtcttgataacgtcattctggtgaagcgcgaagatcgccagccagtgcacagctttaagctgcgcggcgcatacgccatgatggcgggcctgacggaagaacagaaagcgcacggcgtgatcactgcttctgcgggtaaccacgcgcagggcgtcgcgttttcttctgcgcggttaggcgtgaaggccctgatcgttatgccaaccgccaccgccgacatcaaagtcgacgcggtgcgcggcttcggcggcgaagtgctgctccacggcgcgaactttgatgaagcgaaagccaaagcgatcgaactgagtcagcagcaggggttcacctgggtgccgccgttcgaccatccgatggtgattgccgggcaaggcacgctggcgctggaactgctccagcaggacgcccatctcgaccgcgtatttgtgccagtcggcggcggcggtctggctgctggcgtggcggtgctgatcaaacaactgatgccgcaaatcaaagtgatcgccgtagaagcggaagactccgcctgcctgaaagcagcgctggatgcgggtcatccggttgatctgccgcgcgtagggctatttgctgaaggcgtagcggtaaaacgcatcggtgacgaaaccttccgtttatgccaggagtatctcgacgacatcatcaccgtcgatagcgatgcgatctgtgcggcgatgaaggatttattcgaagatgtgcgcgcggtggcggaaccctctggcgcgctggcgctggcgggaatgaaaaaatatatcgccctgcacaacattcgcggcgaacggctggcgcatattctttccggtgccaacgtgaacttccacggcctgcgctacgtcagtgaacgctgcgaactgggcgaacagcgtgaagcgttgttggcggtgaccattccggaagaaaaaggcagcttcctcaaattctgccaactgcttggcgggcgtagcgtcaccgagttcaactaccgttttgccgatgccaaaaacgcctgcatctttgtcggtgtgcgcctgagccgcggcctcgaagagcgcaaagaaattttgcagatgctcaacgacggcggctacagcgtggttgatctctccgacgacgaaatggcgaagctacacgtgcgctatatggtcggcggacgtccaagccatccgttgcaggaacgcctctacagcttcgaattcccggaaagtccgggcgcgctgctgcgcttcctcaacacgctgggtacgtactggaacatttctttgttccactatcgcagccatggcaccgactacgggcgcgtactggcggcgttcgaacttggcgaccatgaaccggatttcgaaacccggctgaatgagctgggctacgattgccacgacgaaaccaataacccggcgttcaggttctttttggcgggttaaggaaaaatgcctgatagcgcttcgcttatcaggcctacccgcgcgacaacgtcatttgtggttcggcaaaatcttccagaatgcctcaattagcggctcatgtagccgctttttctgcgcacacacgcccagctcaaacggcgttttctcatcgctgcgctctaaaatcatcacgcggttacgcaccggttcggggctgttttccagcaccacttccggcaacaatgccacgccacagccgagtgccaccatgcttaccatcgcttcatgcccgccaaccgtggcgtaaatcatcgggttactgattttattgcgtcgaaaccacagttcaatgcggcggcgtaccggcccctgatcggccataataaacggcaccgtactccagtccggcttctctacgctcacctgattacgcaccgggcagggcagcgcgggggcaatcagcactactgccagattctccagcatgctaaacgccactgcgccgggcaaggtttccggtttacccgcaatcgccagatccgcttcaccagtgaccaccttttccatcgcatctgccgcatcaccagtagtaagtttaatctccacgctcgggtgttccgcgcggaagcgatccagaatcggcggcagatggctgtaggcagcggtcacgctgcagaagatatgtaattcgccagagaggctcggcccttgctgatcgatggtgtggcgcaactgctgatactgcaacagcgtttgctgggcgaaaacgcgcagctcttcgcccgcttcagtcagcgtcaccgtgcggttatcgcgcacaaacagcggctgaccgagatcttcttccaggcgctgaatctgccgactgagcgtggatgggctaacgtgcatcgcccgcgcgctgcggccaaaatggcggctttccgccagatgcaggaaggttttcagatcgcgtaaatccacagggacagccctcgatgttgacgttgcaaaaattgcaatgtgacgttgtgaatatatcaatttccgcaataaatttcctgtcatatagtgaattcaatctcgcaaacgcgaaccgaacaataagaagcacaacatcacgaggaatcaccatggctaactacttcaatacactgaatctgcgccagcagctggcacagctgggcaaatgtcgctttatgggccgcgatgaattcgccgatggcgcgagctaccttcagggtaaaaaagtagtcatcgtcggctgtggcgcacagggtctgaaccagggcctgaacatgcgtgattctggtctcgatatctcctacgctctgcgtaaagaagcgattgccgagaagcgcgcgtcctggcgtaaagcgaccgaaaatggttttaaagtgggtacttacgaagaactgatcccacaggcggatctggtgattaacctgacgccggacaagcagcactctgatgtagtgcgcaccgtacagccactgatgaaagacggcgcggcgctgggctacagccacggtttcaacatcgtcgaagtgggcgagcagatccgtaaagatatcaccgtagtgatggttgcgccgaaatgcccaggcaccgaagtgcgtgaagagtacaaacgtgggttcggcgtaccgacgctgattgccgttcacccggaaaacgatccgaaaggcgaaggcatggcgattgccaaagcctgggcggctgcaaccggtggtcaccgtgcgggtgtgctggaaagctccttcgttgcggaagtgaaatctgacctgatgggcgagcaaaccatcctgtgcggtatgttgcaggctggctctctgctgtgcttcgacaagctggtggaagaaggtaccgatccagcatacgcagaaaaactgattcagttcggttgggaaaccatcaccgaagcactgaaacagggcggcatcaccctgatgatggaccgtctctctaacccggcgaaactgcgtgcttatgcgctttctgaacagctgaaagagatcatggcacccctgttccagaaacatatggacgacatcatctccggcgaattctcttccggtatgatggcggactgggccaacgatgataagaaactgctgacctggcgtgaagagaccggcaaaaccgcgtttgaaaccgcgccgcagtatgaaggcaaaatcggcgagcaggagtacttcgataaaggcgtactgatgattgcgatggtgaaagcgggcgttgaactggcgttcgaaaccatggtcgattccggcatcattgaagagtctgcatattatgaaagtctgcacgagctgccgctgattgccaacaccatcgcccgtaagcgtctgtacgaaatgaacgtggttatctctgataccgctgagtacggtaactatctgttctcttacgcttgtgtgccgttgctgaaaccgtttatggcagagctgcaaccgggcgacctgggtaaagctattccggaaggcgcggtagataacgggcaactgcgtgatgtgaacgaagcgattcgcagccatgcgattgagcaggtaggtaagaaactgcgcggctatatgacagatatgaaacgtattgctgttgcgggttaagtgcgcgctgatgccctcaccccgaccctctcccacagggagagggagaaaacactcaaggccttctcctggagaaggccttgctattagttgcggtacagcaccttaatgatgtgatatccgaactgggtgtgcagcgggccggtcggctccagtaccggacaagagaaaaccactttatcgaacgccggaaccatctgaccctggcggaattcacctaaatcaccgccgcgtttgccacttgggcaaatggagtgtttcttcgccagcttgccgaaatcggccccgttcttaatctgctcgagaagatccagagccagtttctcttcttttacaaggatatgcagtgctgctgctgtttttgccatgatcgtgccttgagtgaataattgtcaggcggcgattttagcatgatccgcagatgctaacgtaattgtcagtcagggagtggctggtacatatatggcaaaagcccggaaaatccgggcttcgcaggtccctcaaggggagaaaacttagggcctctatgggctacaaagtcattatcggggatggttattttattgtcaatttatgaggcttatggcattgatactcttgatgaccgccctctgtatgtctgcaaccaactcatgtggcaaacattgattaagataccctctgtaagtccttgctctgtttaatctgtttcgactgacttgttgtaccaggtcggctttggcccaacgaatctgctgatcaaagaattgcaggtcattgataacattactggctatttcaacatgcattccacgttttaacttgtctggtcggctgtggttgataatggaacgacgatgcatgcgttgccattaatttttccgttgagcacgacaactaacctgttttttatcatttcaggaggaatgcggccatcgtaatacgtcgtgctgaacggtccattttggctaacaggatagttaccaaagttgcattccagtatttcaccaaccttagggctgaaattaatcgccacgagtaaacctctccttagtaaactctgaaaaagtaataacacaacgttacgacccgatattttctaagtctaatggattcacgatgaactccgatttcggtcttctctctctgatttaaacatccgcagccaaccggttagcggcttacacgcggtcacattcaaatgcgattctgctacaatcctccccccgttcgaagattgagcaatacacctatgcgtctaaaccccggccaacaacaagctgtcgaattcgttaccggcccctgcctggtgctggcgggcgcgggttccggtaaaactcgtgttatcaccaataaaatcgcccatctgatccgcggttgcggttatcaggcgcggcacattgcggcggtgacctttactaataaagcagcgcgcgagatgaaagagcgtgtagggcagacgctggggcgcaaagaggcgcgtgggctgatgatctccactttccatacgttggggctggatatcatcaaacgcgagtatgcggcgcttgggatgaaagcgaacttcagcttgtttgacgataccgatcagcttgctttgcttaaagagttgaccgaggggctgattgaagatgacaaagttctcctgcaacaactgattagcaccatctctaactggaagaatgatctcaaaacaccgtcccaggcggcagcaagtgcgattggcgagcgggaccgtatttttgcccattgttatgggctgtatgatgcacacctgaaagcctgtaacgttctcgacttcgatgatctgattttattgccgacgttgctgctgcaacgcaatgaagaagtccgcaagcgctggcagaacaaaattcgctatctgctggtggatgagtatcaggacaccaacaccagccagtatgagctggtgaaactgctggtgggcagccgcgcgcgctttaccgtggtgggtgacgatgaccagagcatctactcctggcgcggtgcacgtccgcaaaacctggtgctgctgagtcaggattttccggcgctgaaggtgattaagcttgagcagaactatcgctcttccgggcgtattctgaaagcggcgaacatcctgatcgccaataacccgcacgtctttgaaaagcgtctgttctccgaactgggttatggcgcggagctaaaagtattaagcgcgaataacgaagaacatgaggctgagcgcgttactggcgagctgatcgcccatcacttcgtcaataaaacgcagtacaaagattacgccattctttatcgcggtaaccatcagagccgggtgtttgaaaaattcctgatgcaaaaccgcatcccgtacaaaatatctggtggtacgagctttttctctcgtcctgaaatcaaggacttgctggcttatctgcgcgtgctgactaacccggacgatgacagcgcatttctgcgtatcgttaacacgccgaagcgagagattggcccggctacgctgaaaaagctgggtgagtgggcgatgacgcgcaataaaagcatgtttaccgccagctttgatatgggcctgagtcagacgcttagcggacgtggttatgaagcattgacccgcttcactcactggttggcagaaatccagcgtctggcggagcgggagccgattgccgcggtgcgtgatctgatccatggcatggattatgaatcctggctgtacgaaacaagccccagcccgaaagccgccgaaatgcgcatgaagaacgtcaaccaactgtttagctggatgacggagatgctggaaggcagtgaactggatgagccgatgacgctcacccaggtggtgacgcgctttactttgcgcgacatgatggagcgtggtgagagtgaagaagagctggatcaggtgcaactgatgactctccacgcgagcaaagggctggagtttccttatgtctacatggtcggtatggaagaagggtttttgccgcaccagagcagcatcgatgaagataatatcgatgaggagcggcggctggcctatgtcggcattacccgcgcccagaaggaattgacctttacgctgtgtaaagaacgccgtcagtacggcgaactggtgcgcccggagccgagccgctttttgctggagctgccgcaggatgatctgatttgggaacaggagcgcaaagtggtcagcgccgaagaacggatgcagaaagggcaaagccatctggcgaatctgaaagcgatgatggcggcaaaacgagggaaataatcaaggccggaaaagatgcgtcagcatcgcatccggcacttactcattaatgcacttccagcggccagtggacatagctctgccactggctttcctgagcaataatctctttacccagcggatgttgggttagccaaccttgcggaagcgtcaaggtcaacagttcatggttagcctgtaatgtcatctctggcacgagatcgtcacggcgacggctggcaaaaatgatggccaggcgtagtaaacggcagagttgttctgcgacgcgcggcggtacggcattttgctgatgcaggctactgagatcgaccggattagtctggttgagcagtagcgtcgccagcaattttttctgtgcgggggtaaaaccgggaagatccagattacgcaccagataagcagcgtgttgcggcgcttgtttgaagtcaacgctcaggccgatttcatgaagctgacaggcgctgatgagcaaatcgcggcttattgcttcaagatgccattcgttttccacctgatcgaagaagttagccgcaactttggctacgcgctgtgcctgatcaatatcgatcataaagcggcgttgaatattacgcagcgtacggctgcgaatatcctgctcgacggccagatgcaacatgccgtagaccaggccttcacgcagcgcaccgcccgccagggtcatacactgaatattcagttcggtaaaaatggcgatcaggatcgccagaccactcgggaacactaacgcacgttccagcgtcagcccgtcaatctccagttcctccagccgaccgcaatgaatggctcgctgtttcaattgctgcaacttttccagggtaatgcgttcatccatcccctgtgccatcatgatttcctgtaacgcctgcacggtgccggaagcaccaacgcacactttccagccgtgataccgtaattcatcggcaaccggacgtaacacttcgcgtgccgctttttctgcagcatcaaaattttcctgccccagattacgatcggcaaaatagcgttccagccaggtgacgcagcccatgctcaggctgaacaagctggtggtttgtgcacccgtgccggttaccagttcagtactggctccgcctatatccaccaccaggcgctgatcggcaccaccagtggtgtgagcaacgccctgataaatcagacgtgcttcctcttcaccgctgatcacctgtaccggacaaccgagaatttcctgcgctttggcaataaaatcacccgcattgacggcaaggcgtaacgtcgccgtagcgacaacgcgaatttggctgggaggaatatcttgcagacgttcagcaaacaggcgcaaacattgccaaccgcgctccattgcttcattggagagggcattttcgctattcaggccagcagccagacgcactttgcgttttattcgcgtcagcgtctggatgcttccagccacctcgcgcacaaccagcatatgaaaactattgctaccgagatcaatggctgcatacaggctgctggtggaacccatactcttcatccttcaatctgtctctgtgttggctgcattctttcacctgaatcacttactacagtaagctcatcgggattcattctcttgccatcttgatacagtttgaatgattttgagtatgacattttttatttaaccactacgacgacgattacgcggagcgccagtacgacgcggaccattgcctgtgcgcgggcgcgtgaggcgcagcggttttggcagatcggtcatcaatgcgtccggattgtatttgcttaccggaatactgtgaccaatataggtctcaatagcaggcaaattcaatgcatactcttcacacgccaggctgatagagtgaccgcttgcgcctgcgcgacctgtacgaccaatacggtgaacgtaatcttcacagtcatcgggtaaatcgtagttaaagacgtgcgtcactgccggaatatgcaaaccacgcgcggcaacgtcggtggcaaccagaatatccagatcgccacgggtaaattcatcaagaatacgcagacgttttttctgcgcgacatcgcctgtcaataaaccgacacgatgaccatctgctgccaggtggccccagatctcttcacaacggtgtttggtgttggcgaaaataatcgctctgtctggccactcttcttcgatcagcgtttgcagcaaacgcattttttcttcgttagaagggtagaaaagctcttctttaatacggtggcccgttttctgttccggttccacttcaatatattcggcattgttcatctgctcgaacgccagttcacgtacccggtagctaagcgtggcggagaacagcatgttgaggcgctggtttgcaggcggcatacggcggaacagccagcggatatctttaataaagcccagatcgtacatgcgatcggcttcgtccagtaccaccacctgaatggcaccgaggttaatgtggttctgcttggcgtagtcaattaaacgccccgtggtgccaatcagaatgtcaacgccgctttccagcactttcagctgtttgtcgtagccatcaccaccgtaagccagacccagcttcaggccagtagcttccgccagcggttctgcgtcggcatggatctgcacggcaagttcacgcgtcggtgccataattaaggcacgcggctgattcaccttgcgatcggcaatcgcaggatgagagagaagataatgaaacgtactcgtaagaaacgccatcgttttcccggtaccggtttgcgcctgcccggctacgtcacgacccgccagcgtcagcggaagggccagtgcctgaatgggcgtacagttatgaaacccttttttttcaagggcttctacaaccttcggatgcagggcgaagtcggaaaacttctgttctgttaaatgtgttttgctcatagtgtggtagaatatcagcttactattgctttacgaaagcgtatccggtgaaataaagtcaacctttagttggttaatgttacaccaacaacgaaaccaacacgccaggcttattcctgtggagttatatatgagcgataaaattattcacctgactgacgacagttttgacacggatgtactcaaagcggacggggcgatcctcgtcgatttctgggcagagtggtgcggtccgtgcaaaatgatcgccccgattctggatgaaatcgctgacgaatatcagggcaaactgaccgttgcaaaactgaacatcgatcaaaaccctggcactgcgccgaaatatggcatccgtggtatcccgactctgctgctgttcaaaaacggtgaagtggcggcaaccaaagtgggtgcactgtctaaaggtcagttgaaagagttcctcgacgctaacctggcgtaagggaatttcatgttcgggtgccccgtcgctaaaaactggacgcccggcgtgagtcatgctaacttagtgttgacttcgtattaaacataccttattaagtttgaatcttgtaatttccaacgcttcccgttttatcttaaatgcgaagtgaacagatttctggcagcagtctcaatccgtcttgtcgtttcagttctgcgtactctcctgtgaccaggcagcgaaaagacatgagtcgatgaccgtaaacaggcatggatgatcctgccataccattcacaacattaagttcgagatttaccccaagtttaagaactcacaccactatgaatcttaccgaattaaagaatacgccggtttctgagctgatcactctcggcgaaaatatggggctggaaaacctggctcgtatgcgtaagcaggacattatttttgccatcctgaagcagcacgcaaagagtggcgaagatatctttggtgatggcgtactggagatattgcaggatggatttggtttcctccgttccgcagacagctcctacctcgccggtcctgatgacatctacgtttcccctagccaaatccgccgtttcaacctccgcactggtgataccatctctggtaagattcgcccgccgaaagaaggtgaacgctattttgcgctgctgaaagttaacgaagttaacttcgacaaacctgaaaacgcccgcaacaaaatcctctttgagaacttaaccccgctgcacgcaaactctcgtctgcgtatggaacgtggtaacggttctactgaagatttaactgctcgcgtactggatctggcaagtcctatcggtcgtggtcagcgtggtctgattgtggcaccgccgaaagccggtaaaaccatgctgctgcagaacattgctcagagcattgcttacaaccacccggattgtgtgctgatggttctgctgatcgacgaacgtccggaagaagtaaccgagatgcagcgtctggtaaaaggtgaagttgttgcttctacctttgacgaacccgcatctcgccacgttcaggttgcggaaatggtgatcgagaaggccaaacgcctggttgagcacaagaaagacgttatcattctgctcgactccatcactcgtctggcgcgcgcttacaacaccgttgttccggcgagtggtaaagtgttgaccggtggtgtggatgccaacgccctgcatcgtccgaaacgcttctttggtgcggcgcgtaacgtggaagagggcggcagcctgaccattatcgcgacggcgcttatcgataccggttctaaaatggacgaagttatctacgaagagtttaaaggtacaggcaacatggaactgcacctctctcgtaagatcgctgaaaaacgcgtcttcccggctatcgactacaaccgttctggtacccgtaaagaagagctgctcacgactcaggaagaactgcagaaaatgtggatcctgcgcaaaatcattcacccgatgggcgaaatcgatgcaatggaattcctcattaataaactggcaatgaccaagaccaatgacgatttcttcgaaatgatgaaacgcagttaaatttgtcttatgccaaaaacgccacgtgtttacgtggcgttttgcttttatatctgtaatcttaatgccgcgctggcgatgttaggaaaattcctggaatttgctggcatgttatgcaatttgcatatcaaatggttaatttttgcacaggactggtgggtttggaacggactttcccttctgaataaaggtcttcgtggttatacttctgctaataattttctctgagagcatgcattgtgaatttactgacagtgagtactgatctcatcagtatttttttattcacgacactgtttctgttttttgcccgtaaggtggcaaaaaaagtcggtttagtggataaaccaaacttccgcaaacgtcaccagggattgatacctctcgttggggggattagcgtttacgcagggatttgcttcacgttcggaattgtcgattactatattccgcatgcatctctctatctcgcttgtgccggtgtgcttgttttcattggcgcgctggatgaccgttttgatatcagcgtaaaaatccgtgccaccatacaggccgctgttggcattgttatgatggtgttcggcaagctttatctcagtagcctgggttatatctttggctcctgggagatggtgctcggaccgtttggttacttcctgacgctatttgccgtctgggcggccattaatgcgttcaacatggttgatggcattgatggcttgctgggcgggttgtcctgcgtcagctttgcagcaatcggtatgattttgtggttcgacgggcaaaccagcctcgcaatctggtgctttgcgatgatcgccgccatcctgccatacatcatgcttaaccttggtatcctgggtcgccgctacaaagtctttatgggtgatgcgggcagtacgctgattggttttaccgttatctggatcctgctcgaaacgacccagggcaaaacccatcccatcagcccggttaccgctttgtggataatcgccattccgctaatggatatggtggcgattatgtaccgtcgcctgcgtaaaggcatgagcccattctctcctgaccgtcagcatattcaccatttgatcatgcgtgccgggtttacttcccgtcaggcgtttgtgctgattacccttgccgcagcactgctcgcttccattggcgtgctggcagaatattctcattttgtcccggagtgggtcatgctggtgctctttttgctagcattcttcctctatggatattgcattaagcgtgcctggaaagttgctcgctttattaagcgcgtaaaacgcagactgcgtagaaatcgtggtggcagccccaatttaaccaaataaatgaggatgtgatgacacaaccaatgcctgggaaaccggccgaagacgctgaaaatgaactggatattcgtgggttgtttcgtaccttgtgggctgggaagctatggattattggcatggggctggcgtttgcgttaatcgcgctggcgtatacgttttttgctcgtcaggagtggagcagcacggcgattaccgatcgtccaacggtgaatatgctggggggatattacagccagcagcaatttttgcgtaacctggatgtccgtagtaacatggcttctgccgaccaaccaagcgtcatggacgaagcctataaagagtttgttatgcaactggccagctgggatacccgcagagagttctggctgcaaaccgactattacaaacagcggatggtgggcaacagcaaagccgatgcggcgttgctggatgaaatgattaacaacatccagtttatccccggagactttacccgcgcggtcaatgacagcgtgaagcttattgccgaaaccgcgcctgacgctaataacctgttacgtcagtatgttgcttttgccagccagcgtgcagccagccatctgaatgatgagctgaaaggcgcatgggcggcgcgtaccatccagatgaaagctcaggtgaagcgtcaggaagaggtggcgaaagccatctacgaccgccggatgaacagcattgagcaggcgctgaaaattgctgagcagcataatattagccgcagtgcgacagatgtacctgccgaggaattacctgatagtgaaatgttcctgcttgggcgtccaatgcttcaggctcgactggaaaatttacaggccgtcggtccggcctttgatctcgactatgatcagaatcgggccatgttaaacaccctgaatgttggtccaaccctggatccgcgttttcagacctatcgctatttgcgtacgccggaagaaccggtaaaacgcgatagcccacgtcgtgccttcctgatgattatgtggggcattgtcggggggctgatcggggctggtgtcgcattaacccgccgttgcagcaaataacaacactgctgcggtgagcgcaaaggcgctcgccgcttattcgaagagaatcgatgtgaaagtactgactgtatttggtacgcgcccggaagccatcaagatggcgccgttggtgcatgcgttggcaaaagatcctttttttgaggctaaagtttgcgtcactgcgcagcatcgggagatgctcgatcaggtgctgaaactcttttccattgtacctgactacgatctcaacataatgcagccaggacagggcctgacagagataacctgtcggattctggaagggctaaaacctattcttgccgagttcaaaccagacgtcgtgctggttcacggcgatacgacgacgacgctggcaaccagcctggcggcgttttatcagcgtattcctgttggtcacgttgaggctggtctgcgcacgggcgatctctatagcccgtggccggaagaggctaaccgtacattgaccgggcatctggcgatgtatcacttctctccaaccgaaacttcccggcaaaacttgctgcgtgaaaacgttgcggatagccgaatcttcattaccggtaatacagtcattgatgcactgttatgggtgcgtgaccaggtgatgagcagcgacaagctgcgtagtgaactggcggcaaattacccgtttatcgaccccgataaaaagatgattctggtgaccggtcacaggcgtgagagtttcggtcgtggctttgaagaaatctgccacgcgctggcagacatcgccaccacgcaccaggacatccagattgtctatccggtgcatctcaacccgaacgtcagagaaccggtcaatcgcattctggggcatgtgaaaaatgtcattctgatcgatccccaggagtatttaccgtttgtctggctgatgaaccacgcctggctgattttgaccgacagtggcggcattcaggaagaagcgcctagcctggggaaacctgtgctggtgatgcgcgataccactgagcgtccggaagcggtgacggcgggtacggtgcgtctggtaggcacggataagcagcgaattgtcgaggaagtgacgcgtcttttaaaagacgaaaacgaatatcaagctatgagccgcgcccataacccgtatggtgatggtcaggcatgctctcgcattctggaagcgttaaaaaataatcggataagtctatgagttttgcgaccatttctgttatcggactgggttatatcgggctgccaacggcagcagcgtttgccagtcggcaaaaacaggtaattggtgtcgatatcaaccaacatgcggttgataccatcaatcgtggcgaaatccatatcgtcgaacctgatttggcgagtgtagtaaaaactgccgtagaaggcggttttttacgagcgagcacgacgccagttgaagcggatgcctggctgattgctgtacccacgccgtttaagggcgatcatgagccagatatgacctacgttgaaagcgctgctcgctccattgcgccagtgctgaaaaaaggcgcgctggtgatccttgaatccaccagcccggtggggagtaccgagaagatggcagaatggttagcagagatgcgtccggatctcactttcccgcagcaggtgggcgagcaggcggacgtcaacattgcttactgcccggaacgcgtgttaccaggacaggtaatggtcgagctgattaaaaacgatcgcgtgattggtggtatgacgccggtttgtagcgcccgcgccagcgaactgtacaaaattttcctcgaaggtgagtgtgtcgtcactaacagccggacggcggaaatgtgtaagctcaccgaaaacagcttccgcgatgtgaatatcgcttttgctaatgaattgagcctgatttgtgccgatcaggggattaacgtctgggaactgattcgcctggcgaatcgtcaccctcgcgttaatattcttcagcctggccctggcgtgggcggtcactgcattgctgttgatccgtggtttatcgtggcacagaacccccagcaggcgcggcttatccgtaccgcgcgcgaagtgaacgatcacaaaccgttctgggttatcgatcaggtgaaagcggcggtggctgattgcctggcggctaccgataaacgcgccagtgaactgaaaatcgcctgctttggtctggcgtttaaaccgaatattgatgacctgcgcgaaagcccggcgatggaaatcgctgaactgatcgcccagtggcatagcggcgaaactctggttgttgagcctaacatccaccagttgccgaaaaaactgaccgggctttgtactctggcgcagcttgacgaggcgctggcaacggcagacgtgctggtgatgctggtcgatcatagtcagttcaaagttatcaatggcgacaatgtccatcagcagtatgtcgtcgatgccaaaggagtctggcgctgatgagaaaaattctgataacaggtggtgccgggtttattggcagcgcgctggtgcgttatatcatcaacgaaacgagcgacgcggtggtagtggtcgataagctgacctacgccggaaacctgatgagcctggcaccggtcgcgcaaagcgagcgctttgcctttgagaaagttgatatctgcgatcgggcagaactggcacgcgtattcactgagcatcagccagactgtgtcatgcatctggcagccgaaagccatgttgaccgttctattgacggcccggcagcgtttattgaaaccaacattgtcgggacttatacattgcttgaagcggcgcgggcttactggaatgcgctgacggaagataaaaaaagtgcgttccgttttcatcatatctccactgacgaagtatatggtgacctgcacagcacggatgatttcttcaccgaaaccacgccgtatgcgccgagcagcccttattccgcgagtaaagccagcagcgaccatctggtgcgcgcctggctgcggacctatggtctgccgacgcttatcaccaactgcagcaataactacggcccttaccactttccggaaaaactgatcccgctgatgatcctcaacgcgctggcgggtaaaagcctgccggtatatggcaacgggcagcaaatccgtgactggctgtatgtggaagatcacgcccgcgcgctgtattgcgtggcgaccaccgggaaagtcggtgaaacctataatattggtggtcacaacgagcgtaagaatctcgatgttgtggaaaccatttgcgagctgctggaagaactggctccgaacaagccgcacggcgtggcgcactatcgtgacctgatcacctttgtcgctgaccgtccggggcatgatctgcgttatgccattgatgctagcaaaattgcccgtgaacttggctggctgccgcaggaaacctttgaaagtggaatgcgtaaaacggttcagtggtatctggctaatgaaagctggtggaagcaggtgcaggacggcagctatcagggcgagcgtttaggtctgaaaggctaattttcagcggaggcaaacatgaaaggtattatcctggcgggcggttccggcacccgattgcatccgattacgcgcggcgtaagcaagcaactgttgccgatttacgataagccaatgatttactatccgctgagcgtgctgatgctggccggtatccgcgaaattctcatcatcactacgccggaagataaaggttatttccagcgcctgctgggcgatggtagtgagttcggtatccagctggaatatgccgaacagcccagcccggacggtctggcgcaggcctttatcatcggtgaaaccttccttaatggtgaaccttcttgtctggtgctgggcgataacatcttcttcggtcagggcttcagtccgaagctgcgtcatgttgcggcgcgcaccgaaggggcgacggtttttggctatcaggtgatggacccggaacgctttggcgtggtggagtttgacgacaatttccgcgctatcagcctggaagaaaagccaaaacagccgaagagtaactgggcggtgaccgggctttatttctacgacagtaaagtcgtggagtacgcaaagcaggtgaagccgagcgagcgtggtgaactggagattacctccatcaaccagatgtacctcgaggcgggcaacctgaccgttgaactgctcgggcgcggatttgcctggctggataccggcactcacgacagcctgattgaagccagcacctttgtacagacggtggaaaaacgccagggctttaagattgcctgcctggaagagattgcctggcgtaacggctggctcgatgacgagggtgtgaagcgtgctgccagtagtttagcgaaaactggctacggccaatatctgctggagttacttcgtgcccgtccgcgccagtattgagccactaacctgggaaaacgccttctttggtgttaacagcgccatcgtgcgcattacgtctgaagcaccgctcctgacgccagacgcgttagcgccgtggtcacgggtgcaggccaaaattgcggcaagtaatacgggtgaactggatgccctgcaacagctgggattctccctggtagaaggtgaagttgatttggcgctacccgtgaacaatgccagtgatagcggtgctgtagtggcacaagagaccgatattcccgcattacgtcagttagccagcgccgcatttgcgcaaagccgttttcgtgcgccgtggtatgcgcctgacgccagcagtcgcttttatgcacagtggattgaaaatgccgtgcgcggcacctttgatcatcaatgtctgattttacgtgcggcgtccggcgatattcgcggctatgtctctttacgggaactcaatgcgacagatgcgcgaattggcctgctggctggacgcggtgcaggtgctgagctgatgcaaacggcgctaaactgggcgtatgctcgcggtaaaacaactttgcgggtggcgacccaaatgggcaacaccgccgcgcttaaacgatacatacaaagtggtgcgaatgtagaaagcaccgcgtactggttatacaggtgatcacatgattccatttaacgcaccgccggtggtgggaaccgaactcgactatatgcagagcgcaatgggtagcggcaaactgtgtggcgatggcggttttacccgtcgctgccagcagtggctggagcaacgttttggcagcgccaaagtgttactgacgccgtcctgcaccgctagcctggagatggcggcgctgctgctcgatatccagcctggcgatgaagtgatcatgccgagctacacctttgtctccaccgccaatgcctttgtgctgcgtggcgcaaaaatcgtttttgtggatgttcgcccggacaccatgaacatcgacgaaacgctgattgaagcggcgatcaccgacaaaacgcgcgttatcgtgccggtccattacgcgggtgtggcctgcgaaatggacaccattatggcgttggcgaaaaagcataatttgtttgtggtagaagatgccgctcagggcgtgatgtccacttacaaagggcgtgcactgggaaccattggtcatattggctgctttagcttccatgaaaccaaaaactacacggcgggcggtgaaggcggcgcgacgctgattaacgataaagcgttaatcgaacgagccgagatcatccgtgaaaagggcactaaccgcagccagttcttccgtggtcaggtcgataaatatacctggcgcgatattggctccagctatttgatgtccgatctgcaagctgcatacctgtgggcgcaactggaagcagcggatcgtatcaaccagcaacgtctggcgctgtggcaaaactactacgatgcgttagcgcctctggcgaaagccgggcgtatcgagctgccgagcattcccgatggctgcgtgcagaacgcgcatatgttctacattaaactgcgggatattgatgaccggagcgcgttgattaactttctgaaagaagcggaaatcatggcggtgtttcattacattccgctgcacggttgccctgcgggggaacactttggtgagttccacggtgaagatcgctacaccaccaaagagagcgagcgcctgctgcgcctgccgctgttctacaacctgagccccgtcaatcagcgtacggtaattgcgactttgttgaactacttttcctgatatgagcttggcaaaagcgtccttgtggacggcggccagtacactggtcaagattggtgccgggttactggtcggtaagttgctggcggtgagttttggtccggcggggcttgggctggcggcaaatttccgccagttgattaccgtgctcggcgtgcttgccggggctggcatctttaacggtgtaaccaaatacgttgcccagtaccatgataatccgcaacagctgcgccgcgtggtcggcactagtagtgcgatggtacttggtttctctacgctgatggcgctggtttttgtgctggcagctgcgccaatcagccagggattgtttggtaataccgactatcaggggctggtgcgtttagtggcgctggtgcaaatggggatcgcctggggcaacctgttactggcgctgatgaaaggctttcgcgatgccgcaggtaatgcgttaagcctgattgtcggcagcttgattggcgttctcgcgtactacgtcagttaccgtttgggcggttatgaaggggcgttgctgggtctggcgctgattcccgcgctggtggtaattcctgccgccatcatgttgatcaaacgtggtgtcatcccgttaagctatctgaaacccagctgggataacggtctggcagggcagttgagcaaatttacgctcatggcgttgattacgagcgtgaccttgcctgttgcttacatcatgatgcgtaaactgctggcggcgcagtatagctgggatgaggtggggatctggcaaggggtgagcagtatttccgatgcctacctgcaatttattacggcaagcttcagcgtatatttgctgcccacgttgagccggctaacggaaaagcgcgatatcacccgggaagtggttaaaagcctgaaattcgtcttaccggcagtggcggcggcgagttttaccgtctggctgctgcgtgattttgctatctggctgctgttgagcaataaatttaccgctatgcgcgatctctttgcctggcagttagtgggtgatgtgttaaaagtgggcgcttatgtctttggttatctggtgatcgccaaagcgagtctgcggttttatattctggcggaagtcagccagttcactttattgatggtatttgcccactggctaatccctgcgcatggtgcactgggcgcggcgcaggcatatatggcaacttatatcgtctatttttctctttgttgtggcgtgtttttactctggcgtaggcgggcatgactgtactgattcacgtactgggaagcgatatccctcaccataaccgaaccgttttgcggtttttcaatgacgcgctggccgcgacgagcgagcacgcgcgcgagtttatggttgttggcaaggacgacggcttaagtgatagctgtccggcgctttctgtgcaatttttccctgggaaaaaaagcctggcggaagcggtcatcgcgaaagcaaaagctaaccgtcagcagcgttttttcttccacggtcagttcaatcccacactgtggctggctctgctgagtggtggcattaagcccagccagtttttctggcatatctggggggcagacctgtatgagctttccagtggcttgagatataagcttttttacccactacgtcgcctggcgcaaaagcgagtcggctgtgtatttgccacccgcggcgatttgagcttttttgccaaaacgcacccaaaggtgcggggcgaactgctgttcttcccgacgcggatggaccctagcctcaatacgatggcgaacgatcggcaacgtgaagggaaaatgaccattctggtggggaactccggcgaccgcagcaatgagcatattgctgccttgcgcgccgttcatcagcaatttggcgatacggtaaaagtggtggtgccgatgggatatccgcctaataacgaagcgtacattgaggaagttcgtcaggcggggctggagttattcagcgaagaaaatctacaaattctgagcgaaaaactggaatttgacgtctatctggcgctacttcgtcagtgcgatcttggttactttatttttgcccgccagcagggcattggtacgctgtgcttactgattcaggcgggcattccttgtgtgcttaaccgggaaaatccgttctggcaggatatgacggaacaacatttgccggtgctgtttactaccgacgatctcaacgaggatattgtgcgtgaagcgcagcgccagttggcgagcgtggataaaaacaccattgccttctttagccctaactatctacaaggctggcagcgggcgttggcgattgccgccagggaggtcgcatgagtctgctgcaattcagtggcctgtttgttgtctggctgctctgcacgctgtttattgccacgctgacctggtttgagtttcgccgtgtgcgctttaacttcaatgtcttctttagtttgctgtttttgctcacctttttcttcggcttcccgctgaccagcgtgctggtatttcgctttgatgttggtgtcgcgccgccagaaatcttgttgcaggcgttgctttctgcgggctgcttctacgcggtttactatgtcacctacaaaacccgcctacgcaaacgcgttgctgatgtaccgcgccgtccgctgtttaccatgaaccgcgtggagaccaatcttacgtgggtgatcctgatgggtatcgcgctggtaagcgtcggcatcttcttcatgcacaacggctttttgctgttccggcttaactcctacagtcagatcttttccagtgaagtctccggcgtggcgttaaaacgcttcttttactttttcatcccggcgatgctggtggtctactttctgcgccaggacagcaaagcgtggctgtttttcctcgtcagcacggtcgcctttggcttgctgacttatatgattgtcggcggcactcgcgccaatatcatcatcgcattcgctatcttcctgtttattggcattattcgcggctggattagcttgtggatgctggcggcggcgggcgtgctggggattgttggcatgttctggctggcactaaaacgctatggaatgaatgtgagcggcgatgaagcgttctatacgtttctctatctcactcgcgacaccttcagcccgtgggagaatctggcgttgctgttgcagaactacgacaacatcgacttccagggcctggctccaattgtccgcgatttctatgtctttatcccttcctggctgtggccgggtcgcccgagtatggtgctgaacagtgccaactactttacctgggaagtgctgaataaccactccggactggcgatcagccctacgcttataggcagtctggtggtgatgggcggcgcgttgttcatcccgctcggggcgatcgtggttggtctgatcatcaaatggttcgactggctgtatgagctgggcaaccgcgagcctaatcgctataaagctgcgatattgcacagtttctgctttggggcgatcttcaatatgatcgtgctggcgcgtgaagggctggatagctttgtcagtcgcgtggtcttttttatcgtggtcttcggcgcatgtctgatgatcgcaaaactgttgtactggctttttgaaagcgccggactcattcataaacgtacaaaaagtagcctccggacgcaggttgaaggataacaatgaataacaacaccacggcaccaacctatacgctgcgtggcttacagttgattggttggcgtgatatgcagcacgccctcgattatctgtttgctgacgggcagcttaagcagggaacgctggttgccattaatgctgaaaaaatgctgactattgaagataacgccgaggtcagggagttaattaacgctgccgaatttaaatatgcggatggcatcagcgttgtacgtagtgtacgtaaaaagtacccgcaggcgcaggtttcccgcgttgccggtgccgatctctgggaagagctgatggcgcgcgcaggcaaagaagggacgccggtatttcttgtgggcggtaaacctgaagtgctggcgcaaactgaagctaaactgcgcaaccagtggaatgtgaatatcgttggcagtcaggatggttattttaaacccgagcagcgtcaggcgctgtttgaacgcattcatgccagcggtgcgcaaatcgtcaccgttgcgatgggaagcccaaagcaggagatcatcatgcgcgactgccgtctggtacatccagatgcgctgtatatgggcgttggcgggacttacgatgttttcaccggtcacgtaaaacgcgcaccgaaaatctggcaaacgctggggctggagtggctctaccgcctgcttagccagccgagccgcattaagcgtcagcttcgtttgctgcgttatttacgctggcactacaccggcaacctatgattttcctctctttgtaaagcgacggagtggtcactccgtcgcctgtctgcttttttattacacaaagcattcaaatttttaatgctttatttgccatttctcctgaattacgaaaacatttgcaacactcgatgtacccataacgataaccggtaacaccggaaagcatgcaaacacaacacgaggatttatggcagataacaaaccagagctacagcgtgggctggaagctcgacatatcgaactcatcgccctggggggcaccattggcgtcggcctgtttatgggggccgccagtaccctgaaatgggccgggccatccgtattgttggcctatatcatcgccgggctgttcgtctttttcatcatgcgtagtatgggcgaaatgttgttcctcgaaccggttaccggtagcttcgccgtttatgcgcatcgttatatgagcccgttctttggctatctcaccgcctggtcttactggtttatgtggatggcggtggggatctctgaaatcaccgccattggcgtttatgtccagttctggttcccggagatggcgcagtggatacccgcattgatcgcagtggcgctggtggcgttggcgaatctggcggcggtgcggttgtacggcgaaatcgagttctggttcgcgatgatcaaagtcaccacgattatcgtgatgattgtcattggcctgggcgtgattttctttggctttggcaatggcgggcagagcattggttttagcaatctcacagagcatggcggtttctttgcgggtggctggaaagggttcctgaccgctctgtgtattgtggtggcgtcctaccagggcgtggagctgattggcattactgccggtgaagcgaagaatccgcaggtgacgctgcgcagtgccgtaggcaaggtgctgtggcggatcctgattttctacgtaggcgcgattttcgttatcgtcaccatcttcccgtggaatgaaataggcagcaacggcagcccgttcgtactgacttttgccaaaatcggtattaccgcagcggcgggcattatcaactttgtggtgctgacggctgcgctctctggctgtaacagcggcatgtacagttgcggacgtatgctctacgcactggcgaaaaaccgtcagttaccggcggcaatggcgaaagtttcccgtcacggcgtaccggttgcgggtgtggcagtatctattgctattctgctaattggcagttgcctgaactacatcattcccaatccgcagcgtgtgtttgtctacgtctacagtgccagcgtgcttccggggatggtgccatggtttgtgatattgataagccagctgcgttttcggcgtgcacataaagcggcgattgccagccatccgttccgcagtatcctgttcccgtgggccaattacgtaacaatggcattcctgatttgcgttttgatcggcatgtactttaatgaagatacgcgtatgagcctgtttgttggcatcatctttatgctggcggtgacggcgatttataaagtttttggccttaatcgccacgggaaagcgcataaactggaggaataagcagcaaaacgcacaaaccgtaaccaaacgcgcaatttatttaaaaagggactagacagaggggtgggaagtccgtattatccacccccgcaacggcgctaagcgcccgtagctcagctggatagagcgctgccctccggaggcagaggtctcaggttcgaatcctgtcgggcgcgccatttagtcccggcgcttgagctgcggtggtagtaataccgcgtaacaagatttgtagtggtggctatagctcagttggtagagccctggattgtgattccagttgtcgtgggttcgaatcccattagccaccccattattagaagttgtgacaatgcgaaggtggcggaattggtagacgcgctagcttcaggtgttagtgtccttacggacgtgggggttcaagtccccccccctcgcaccacgactttaaagaattgaactaaaaattcaaaaagcagtatttcggcgagtagcgcagcttggtagcgcaactggtttgggaccagtgggtcggaggttcgaatcctctctcgccgaccaattttgaaccccgcttcggcggggttttttgttttctgtgcatttcgtcaccctcccttcgcaataaacgcccgtaataactcattgccccacggtatgatttcgcccttaacgtattgaaggatgacttcaggcaaggagcgaccatgctgcaacaggttccaacgcgtgcttttcatgtgatggcgaaaccgagcggttccgattgtaatctgaactgtgactactgtttttatctcgaaaaacaatccctttaccgcgaaaagccagtcacgcatatggacgatgacacgctggaagcgtatgtccgtcactatatcgctgccagcgaaccgcaaaacgaagtggcttttacctggcagggcggcgaaccaacgctactcgggctggcgttttaccgccgtgccgtagcgctacaggcgaaatatggtgctggcaggaagataagtaacagcttccagactaacggcgtgctgctggatgacgaatggtgcgcgtttctcgcggagcatcattttcttgttggtttaagcctggatggcccgcctgagatccacaatcaatatcgcgtgactaaaggtggcagacccacgcataagctggtgatgcgtgccctgacgctcctgcaaaaacatcatgtcgactataacgtgctggtctgcgttaatcgcaccagcgcgcagcaaccgttgcaggtatatgattttttgtgcgatgcgggagtcgaattcatccagtttattccggtggtcgagcgcctggctgatgaaacaactgcccgcgatggacttaagttacatgcgcctggtgatattcagggtgagctaacggaatggagcgtgcgccccgaggagttcggtgagtttctggtggcgatattcgaccactggatcaaacgcgacgtcggcaagattttcgtgatgaatatcgaatgggcgtttgccaattttgtcggtgcgccgggtgcggtttgccatcatcagccaacctgtgggcgcagcgtgattgttgagcacaacggcgacgtttacgcctgtgatcactatgtttatccgcaatatcggctggggaatatgcaccagcaaacaattgcagaaatgatcgattccccgcaacagcaggcgtttggtgaagataaatttaagcagttaccggcgcagtgtcgcagttgtaacgtgttaaaagcgtgctggggaggctgcccgaaacaccgcttcatgctcgatgccagcggcaaaccgggactgaattatttgtgtgccgggtatcagcgttatttccgccatctaccgccatatcttaaagcaatggctgatttgctggcgcacggtcgcccggccagcgacattatgcatgcgcatttgctggtggtgagtaagtaaaaatcggcggccgcctgcggttgattgccggatgcggcgtaaacgccttatccggcctacatgatcgtgcaaattcaataaattgcagcgttctgtaggctggataagatgcgtcagcatcgcatccggcaaaggcagatctcagcgatagcgccggcttagtcagatttaatctgcgcgcgtggtggatattttttcaggatctccatatacgcgtgcatttcggtctgtagcggtacacccatcggaatatggcgcacgccgatggagtcgctttcctgcggatcggtgtagaggttaaacacgctgcttcccgccgtttgcattactgtgccggtgaatccaccctgatatccgctctgggtataagcgtaaggttgctgaatcaggacgtgatacttgaactcatccatacgcacagcagcgagtttaccgttgaggaagtagtgctcggccttacggttagactgaccatttgttcccaggaagaaggatgtctggtccacaccatcgataaaggtggttttcggcactaaattcgccactttcgctccaggatgccctgccagatccagcgcggtagggaagagatctgccagatcgacaataccgtcagatttacgcggttggatcatccctttccagtaaacgaaagtcggtacgcgaacgccgccttcccaggtgctacctttcgcaccacggaacggggtgcgtccgtgcggcggtacttcggcttccggtccgttatcggaggtaaagacgatcagcgtgttatcaagctgaccgtttttctccagtgttttatacagattagcgaacacatcgttcatctccaccatgcagtcgccatagctggtgcgtgccggagagctacccgcatatttcgcatttgggtagttatcgaagtggcagccacgagtgccgtagtagaggaagaatggtttatcgctcttcgccatcttgtcgaggaacttaacgccatagtccatccagcgttgatccagatcttccatatatttcggcgtaatgtcggcaatggcctgttgttcgccgccgcgcaccgcatgaacgtcatctttgctgaacggtaattgcttgatgtattcagaacggtccggactcagggccacttccggattgacgtgaacgtcgcgccattcggtgtacatatcagacacgctgttaaagccacggaaatcatcaaagccaacgttctgcggctggctctctttgttttcccccatatgccattttccgatggcctgagtgacgtagccctgatcgtgcagcaactgcggcagcgtggttaacccttgcagcccgcccggttgcccgtacattggcggcatcagaatgccgtggtggatggagtattgtccggtgagaatggtggcgcgggttggggaagagcttggttgagaatacgcgctagttaaaatcagcccctggctggcaacggcgtcgatatctggtgtagggttacccaccgccacgccgccaccgttaaaaccgacgtccatccagcccacatcgtccagcaagaaaacaaccacattcggtttcttaccggtttttttctcaagttctgccagcttctgctgggtttctttatcctgcgccggatgctgcattactggcatcatattgtcggcaatagtggtcgccggtttaaccagatactggtttgggtgatcgtatccggcaaagcctttgcgtgcggtggcagtactcggggtatctgctgcgctggccatgagaggaagagcggcggcgacagcaacaacaagacgtttgggactaaagctaaattccatgcaaaatgctccggtttcatgtcatcaaaatgatgacgtaattaagcattgataattgagatccctctccctgacaggatgattacataaataatagtgacaaaaataaattatttatttatccagaaaatgaattggaaaatcaggagagcgttttcaatcctacctctggcgcagttgatatgtaaggcaggtttattatatcgcgttgattattgatgctgtttttagttttaacggcaattaatatatgtgttattaattgaatgaattttatcattcataataagtatgtgtaggatcaagctcaggttaaatattcactcaggaagttattactcaggaagcaaagaggattacagaattatctcataacaagtgttaagggatgttatttcccgattctctgtggcataataaacgagtagatgctcattccatctcttatgttcgccttagtgcctcataaactccggaatgacgcagagccgtttacggtgcttatcgtccactgacagatgtcgcttatgcctcatcagacaccatggacacaacgttgagtgaagcacccacttgttgtcatacagacctgttttaacgcctgctccgtaataagagcaggcgtttttttatgtatcaggaaggccccggaggtgcttgcctccgggtgagaaggaattactgtggcgggttattctgcaacgttaacatcaaaccgtcgcgacgcatagctgcagcttcttccggcttgtgcagtctgtccagcgcgtcggcaagccatgcgtaatcgtaggcgtccggacgttgtttcagcgctgcgcggaaggcgaggcttgcttcctgccattctccgtgcttcatcagactctggcccagtgtgctccacaacagcgggcgatcgccgacgtttttgatttgctggcgcagcactttttccagctgttccggattgtttgttttcagtcgaggaatcggcagcagtaggcgatcgtcgtactggcgtttcaggccatcgatgataatttgctgggcagtatcatgatcgtcacattcaataagatgttccgccattgccacctgcaacgctacctgatgacgcgttttccggctttggtttttccaccagttacgcaaaccttcgctaccgttatcggcacgcgcctgatccatcaggccaatccatgcctgttgttccagcattgcacgatgttcttcatcaccaacatgggctttcgccatacttgggataatatccagcaggctactccatgcacctgtgcggatatacgcctgttccgccagacgtaatacttccggatggcgtggcgtaacttccagcagcttatccacgccgtggcgtgcagcatggttttcattacgggccagttgcagacgtacgcgggtgatttctaccggaatggtgtcgttgccggccagctccgctgcgcgttccagatgttggttggcgcgtgcttcatcaccacgttgttgcgcggcttcggcagccagtagatagttcaccaccggttgttccgcgtgatcggcatttttcgccatcagcttttcaacttgctgataatcgccttccgccagtttcagcagcgcctgttcggtctgcttacgtgcacggcgacgcttacgtccgacaaaccacccacgggtgtgcgcgccagtgcggaagatccgccgcagtagccactcaatggcaaacagcactaccatcgccagaatcaatatgatcgccaggcccgtgacgctggtttcgatattgtagttgtcggtctggatcagcacataaccctgatggccggcaatcatcgggccaaccacgatccccgcaatcagcaacacaaagagcaataacacttttagcatggttattctccttgcggcgcggctgccggagtatcagcttgcggtgcaggtgcaggtttagcttccgttgtccccgctgccggttgtgccagcaggttacgcacgcgagtctgcatcagtttttccagcatcgcctggctttgcagggtttccggaagatccatgctgatattttgctggcttaactggtccacctcgtcgaggaacgctttggtggtggcatcatcagtatcgtagtaagcacgtacccaggtggagacgttctccagcgcctggcgataagtctcttcctggtgacgcggtacagcttgtgctgcgaccagcaggcgagagcgaatattttcgcgcagatagatatcctgatttggcgctaacagcggtacggcggtgtcatcacgacggcgaatcgtaatgaagttgtccataaagttctgccagcttttttgcagattgatacgccattcgctgatggaactggaaagctcttcaccgtcactatccatcgggctaccatcgctgtcattatcggccagacgcaggttatctacctgattactaagctgattaagcttaaggatgatgccgtcataatccacctggcttactgcagaaaggctggcgatatcatcggtaattgcccgacgaacggtaatcagactcgggtcattcatatccgccaggctggcgtctgcacttttcagcaacgctgcagcggtcgtgacgtcctgatcgctccacagcttccgtccggcgagtttcaccagaaaatcggcctgagccagcagccaggttttagcatcgctgccggaaatggtggcgaccttttgttggacttcatccaactgttttgccagcgtttcttgctgacgattcgcctgcttaagttgtgcagcttgttgcttaataatgccttccagctcggctttttggctctcctgggctttttgcaatgccgtcagttggttagccagggcatcgctggtggcggtctgattgacggcctgttgtttaccccagccatacaaaccgatgcccgccgccagagcaatagcgatagccaccgcgctgagaatcaatgcggtattgttcttactctttttttctgttgcgacaggttgactcgtggtgtccacggcctccctggtctcttcaaccacggcggaggttttttcttgttccgtcattatggcttcctgttatgagagttattgtaatgcccgtaaaagcgcatcgttgtcagcgttatcggcgaccttaatgtcttgccagcccagttcccgggcgagtttcgccaaacgctcactgacgaccaatagtcgacagtgtagtaaccagtgctcacgataccattgtgggatcaggctccagagttgctgcaacatttcaccgctggtaacaacgaccatcgtcacctcgcgggcttgccagcgcatcgcttcttctgcaccatcgtaatggattgcgcatcgttgataacattcacaaaaagtgacctcagcaccgcgcgccgtcagggtatccccaattagctcacgaccaccattgccacgtaatatcagcgcacgtttgcccgcaatattttgtaattcaggtaattgtagcaagacttcgctgatttcccgatcctgcgggtagagaatcttctgtccacttacggtatgtagtgccagtgcggtggtgcgtccaatggcgaaataatcaggtagtcggggccatttacgatcttgctgatgcagctgactttgggcaaaagcaaccgcgtgttggctgagggcaaacaacagatcgctctcccccagcgctgccagttgatcagcaagttgcggtaattgttgacccggagaaaactcaatcagcggaaaatgccaggccacctgccccagtgtgcgcagacggctcactaactcttctccagcgggagacgggcgggtgacaaggatactcatgccggggcgtctccgttatagacttcagcgaggatctcgcgcgcgccgttattcagtagctcttctgccaggctaatccccatttgttcggcatcttgcggcgcaccgcggcgttcaccgcgaataatctggctaccgtccggcgcgccgaccagcgcacgcagccagatttcgccatcaataagctcggcgtagctaccaattggcacctgacatccgccttcgagacgggtattcatggcgcgttctgcggtaacgcgcagtgcagtttcgtggtgattcagcgcggcaagcagctcgcgagtgcgactatcatcaaggcggcattcaatacccaccgcaccttgtcctaccgccggaagagaaatctcgggtggcaacgcggcgcgaatacgactctccagacctaaacgttttagtccggctacggcaagaatgatggcatcgtattcgccgttatccagtttgctcaggcgagtgccgacgttgccgcgcagggagcggataatcagatccggacggcgttcagccagttggcactggcgacgtaaactggacgtcccgacgatactgcctgccggtaacgcatccagactgtcatagttattggacacaaaggcatcgcgaggatcttcacgctcacaaatagtgaccagtcccagaccttgcgggaattcaaccggcacatctttcatactgtgtacggcgatatcggcgcgattttcgaggagcgcgacttccagctcttttacaaataagccttttccgcctactttcgccagcggcgtatcaagaatcacatcgccgcgcgtcaccatcggtaccagttcaacgaccaggcccggatggctcgccatcaacttgtctttgacatagtgtgcctgccagagtgcaagtgggctttggcgtgtggcaattcttaaaacattgtctaacatgcttgttaccgtcattatcatccgtggtccatcctaacatccttgccagagtgatgtcagtgttgtggtgaaacgtagacgcctgcgcaaaccgtaaaatgaggtctggcagtggatcctgacaggcgtttcacgccgttgtaataaggaatttacagagaataaacggtgctacacttgtatgtagcgcatctttctttacggtcaatcagcaaggtgttaaattgatcacgttttagaccattttttcgtcgtgaaactaaaaaaaccaggcgcgaaaagtggtaacggttacctttgacatacgaaatatcccgaatgccgcgtgttaccgttgatgttggcggaatcacagtcatgacgggtagcaaatcaggcgatacgtcttgtacctctatattgagactctgaaacagagactggatgccataaatcaattgcgtgtggatcgcgcgcttgctgctatggggcctgcattccaacaggtctacagtctactgccgacattgttgcactatcaccatccgctaatgccgggttaccttgatggtaacgttcccaaaggcatttgcctttacacgcctgatgaaactcaacgccactacctgaacgagcttgaactgtatcgtggaatgagtgtacaggatccgccgaaaggtgagcttccaattactggtgtatacaccatgggcagcaccagctccgtagggcaaagttgttcctctgacctggatatctgggtctgtcatcaatcctggctcgatagcgaagagcgccaattgctacaacgtaaatgtagcctgctggaaaactgggccgccagcctgggtgtggaagtcagcttcttcctgattgatgaaaaccgcttccgtcataatgaaagcggcagcctggggggcgaagattgtggctccacccagcatatactgctgcttgacgaattttatcgtaccgccgtgcgtctcgccggtaagcgtattctgtggaatatggtgccgtgcgacgaagaagagcattacgacgactatgtgatgacgctttacgcgcagggcgtgctgacgccaaatgaatggctggatctcggtggcttaagcagcctttctgctgaagagtactttggtgccagcctttggcagctctacaagagtatcgattccccatacaaagcggtactgaaaacactgctgctggaagcctattcctgggaatacccgaacccacgtctgctggcgaaagatatcaaacagcgtttgcacgacggcgagattgtaagctttggtctcgatccatactgcatgatgctggagcgtgttactgaatacctgacggcgattgaagattttacccgtctggatttagtacgtcgctgcttctatttaaaagtgtgcgaaaagctcagccgtgaacgcgcctgcgtaggctggcgtcgcgcagtgttgagccagttagtgagcgagtggggttgggacgaagctcgtctggcaatgctcgataaccgcgctaactggaagattgatcaggtgcgtgaggcgcacaacgagttgctcgacgcgatgatgcagagctaccgtaatctgatccgctttgcgcgtcgcaataaccttagcgtctccgccagtccgcaggatatcggcgtgctgacgcgtaagctgtatgccgcgtttgaagcattaccaggtaaagtgacgctggtaaacccgcagattagtcccgatctcagcgaaccgaatctgacctttatttatgtgccgccgggccgggctaaccgtagtggttggtatctgtataaccgcgcgccaaatattgagagcatcatcagccatcagccgctggaatataaccgttacctgaataaactggtggcgtgggcatggtttaacggcctgctgaccagccgcacccgtttgtatattaaaggtaacggcattgtcgatttgcctaagttgcaggagatggtcgccgacgtgagccaccatttcccgctgcgcttacctgcaccgacaccgaaggcgctctacagcccgtgtgagatccgccatctggcgattatcgttaacctggaatatgacccgacagcggcgttccgcaatcaggtggtgcatttcgatttccgtaagctggatgtcttcagctttggcgagaatcaaaattgcctggtaggtagcgttgacctgctgtaccgcaacagctggaacgaagtgcgtacgctgcacttcaacggcgagcaaagcatgatcgaagccctgaaaactattctcggcaaaatgcatcaggacgccgcaccgccagatagcgtggaagtcttctgttatagccagcatctgcgcggcttaattcgtactcgcgtgcagcaactggtttctgagtgtattgaattgcgtctttccagcacccgccaggaaaccgggcgtttcaaggcgctgcgcgtttctggtcaaacctgggggttgttcttcgaacgcctgaatgtaagcgtacagaaactggaaaacgccatcgagttttatggcgcgattagccataacaaactgcacggcctgagtgtgcaggttgaaaccaatcacgtcaaattaccggcggtggtggacggctttgccagcgaagggatcatccagttctttttcgaagaaacgcaagacgagaatggctttaatatctacattctcgacgaaagcaaccgggttgaggtatatcaccactgcgaaggcagcaaagaggagctggtacgtgacgtcagtcgcttctacagcagtagccatgaccgttttacctacggcagtagcttcatcaacttcaacctgccgcagttctatcagattgtgaaggttgatggtcgtgaacaggtgattccgttccgcacaaaatctatcggtaacatgccgcctgccaatcaggatcacgatacgccgctattacagcaatattttagctgatgaacgtgccggaaagcgaggcttatccggcatgcaatcttagcggaaactgactgtttcacccgcctgctgcgtcgccgcctgttccagcaaatcccagaaggtttcgccgctgcgatcacaaatccactcatcgcctttcaggtcaaaatggtagccgccctgtttggttgccagccatacctggtgcagcggctcctggcggttgataatgattttgctgccattctcaaaggtaatggtcagtacgccgccgttgatttcgcagtcgatatcgctgtcgccatcccagtcgtccaggcgttcttcaatggtcagccagagttgatcagccaggcgatgaaattcactgtcgttcattgttgtatcctgtttttaagtgatggcggcagtatagcggcatggggtcagggcttcaaagtttgcacctctgcggctgcgttccggcacgatagttccgtcaccggaataatgatgtctctgtgtagcgaaagatttgtctctagtttagggcgcagttacaccacgtctttccctgtttctggtaaacattatgatcaggtttaccgagcgagcatcctcacgctgacggaactaaaaaagacaacaaacaaaccacattgcgatagtgcataaagccatcctggcgcgaggtgccgatcacgaaactaccagcaaaacataaatccccacgagtaagcgttatactcgcagcatttcctcacttttcagacttcataaagagtcgctaaacgcttgcttttacgtcttctcctgcgatgatagaaagcagaaagcgatgaactttacaggcaatccataatgaaaaacgtgtttaaggcactcactgtattacttactctcttcagcctgacgggctgcggtctgaaaggtccgctctatttcccgcctgcagataaaaacgcaccgccgccgaccaaaccggtagagacgcaaacgcaatccacggtgccggataaaaacgatcgcgccactggcgatggtccatcccaggtgaattactaaaagtcagtttctgtacccgcgtgattggagtaaatgatgcagttcagcaaaatgcatggccttggcaacgattttatggtcgtcgacgcggtaacgcagaatgtcttttttagtccggagctgattcgtcgcctggctgatcggcacctgggggtagggtttgaccaactgctggtggttgagccgccgtatgatcctgaactggattttcactatcgcattttcaatgctgatggcagtgaagtggcgcagtgcggcaacggtgcgcgctgctttgcccgttttgtgcgtctgaaaggactgaccaataagcgtgatatccgcgtcagcaccgccaacgggcggatggttctgaccgtcaccgatgatgatctggtccgcgtaaatatgggcgaacccaacttcgaaccttccgccgtgccgtttcgcgctaacaaagcggaaaagacctatattatgcgcgccgccgagcagacaatcttatgcggcgtggtgagcatgggaaatccgcattgcgtgattcaggtcgatgatgtcgataccgcggcggtagaaacgcttggtcctgttctggaaagccacgagcgttttccggagcgcgccaatatcggttttatgcaagtggttaagcgcgagcatattcgtttacgcgtttatgagcgtggggcaggagaaacccaggcctgcggcagcggcgcgtgtgcggcggttgcagtagggattcagcaaggtttgctggccgaagaagtacgcgtggaactccccggcggtcgtcttgatatcgcctggaaaggtccgggtcacccgttatatatgactggcccggcggtacatgtctacgacggatttattcatctatgaagcaaccaggggaagaactgcaggaaacactcacggagcttgatgaccgggcggttgtcgattatctgattaaaaatcctgagttttttatccgtaatgcgcgcgcagtagaagcgatacgtgtgccgcatccggtacgcggcaccgttagcttggtcgagtggcacatggcccgcgcacgtaatcatattcatgttctggaagagaacatggcgctgttgatggaacaggctatcgccaacgaaggcctgttttatcgcctactctacctgcagcgcagtctcaccgccgccagcagtctcgacgatatgctgatgcgctttcaccgctgggcgcgcgatctcggcctggcaggtgcgagtctgcgcctgtttccggatcgctggcgcttaggtgcgccgagcaaccacactcatctggcattaagccgtcagtctttcgaaccgctgcgtattcagcgtttggggcaggaacagcactatcttgggccgcttaacggaccagagctgctggtggtgctaccggaagcgaaagcggtgggaagcgtggcgatgagcatgctgggaagcgatgctgatttgggtgtcgtgctgtttaccagtcgcgatgccagtcactatcaacaagggcaaggaacgcagttacttcatgaaattgcgctgatgttgccggagcttctggagcgttggattgaacgcgtatgaccgatttacacaccgatgtagaacgctacctacgttatctgagcgtggagcgccagcttagcccgataaccctgcttaactaccagcgtcagcttgaggcgatcatcaattttgccagcgaaaacggcctgcaaagctggcagcaatgtgatgtgacgatggtgcgcaattttgctgtacgcagtcgccgtaaagggctgggagcagcaagtctggcgttacggctttctgcgctacgtagcttttttgactggctggtcagccagaacgaactcaaagctaacccggcgaaaggtgttagcgcaccgaaagcgccgcgtcatctgccgaaaaacatcgacgtcgacgatatgaatcggctgctggatattgatatcaatgatcccctcgctgtacgcgaccgtgcaatgctggaagtgatgtacggcgcgggtctgcgtctttctgagctggtggggctggatattaaacacctcgacctggagtctggtgaagtgtgggttatggggaaaggcagcaaagagcgccgcctgccgattggtcgcaacgctgtggcgtggattgagcactggcttgatttgcgcgacctgtttggtagcgaagacgacgcgctttttctgagcaaactgggcaagcgtatctccgcgcgtaatgtgcagaaacgctttgccgaatggggcataaaacaagggctgaataatcacgttcatccgcataaattacgtcacagcttcgccacgcatatgctggagagcagcggcgatcttcgtggtgtgcaggagctgctgggtcatgccaacctctccaccacgcaaatctatactcatcttgattttcaacaccttgccagcgtgtacgatgcggcgcatccacgcgccaaacgggggaaataatgcgtttttaccggcctttggggcgcatcagcgcgctcacctttgacctggatgataccctttacgataaccgtccggtgattttgcgcaccgagcgagaggcgcttacctttgtgcaaaattatcatccggcgctgcgcagcttccagaatgaagatctgcaacgcctgcgccaggcggtacgggaagcggaacccgagatttatcacgacgtgacgcgctggcgttttcgtagcattgaacaagcgatgctcgacgccgggctgagtgccgaagaagccagtgcaggcgcacacgcagcaatgatcaactttgccaaatggcgcagccgaatcgacgtcccgcagcaaactcacgacaccttaaaacagctggcgaagaaatggccgctggtggcgatcaccaacggtaacgcccagccggagctgtttggtttgggggattattttgagtttgtgctgcgcgctggcccgcacgggcgcagtaaaccgttcagcgatatgtactttttggctgcggaaaaactcaacgtgccgatcggcgagatcttacatgttggggacgatctcaccactgacgtgggtggggcaattcgcagcggaatgcaggcttgttggatcagaccggaaaatggcgatctgatgcaaacctgggacagccgtttactgccgcatctggaaatttcccggttggcatctctgaccagcctgatataatcagcaaatctgtatatatacccagctttttggcggagggcgttgcgcttctccgcccaacctatttttacgcggcggtgccaatggacgtttcttacctgctcgacagccttaatgacaaacagcgcgaagcggtggccgcgccacgcagcaaccttctggtgctggcgggcgcgggcagtggtaagacgcgcgtactggtgcatcgtatcgcctggttgatgagcgtggaaaactgcagcccatacagcattatggcggtgacgtttaccaacaaagcggcggcggagatgcgtcatcgtatcgggcaactgatgggcacgagccagggcggtatgtgggtcggcaccttccacgggctggcgcaccgtttgctgcgtgcgcaccatatggacgccaatctgccgcaggatttccagatcctcgacagtgaagaccagctacgcctgcttaagcgtctgatcaaagccatgaacctcgacgagaagcagtggccgccgcggcaggcaatgtggtacatcaacagccagaaagatgaaggcctgcgtccgcatcatattcaaagctacggtaatccggtggagcagacctggcagaaggtgtatcaggcgtatcaggaagcgtgtgaccgcgcgggcctggtggacttcgccgagctgctgctgcgcgctcacgagttgtggcttaacaagccgcatatcctgcaacactaccgcgaacgttttaccaatatcctggtggacgaattccaggataccaacaacattcagtacgcgtggatccgcctgctggcgggcgacaccggcaaagtgatgatcgtcggtgatgacgaccagagtatctacggctggcgcggggcgcaggtggagaatattcagcgtttccttaatgatttccccggtgccgaaactattcgtctggagcaaaactaccgctctaccagcaatattctgagcgccgctaacgccctgattgaaaacaataacgggcgtctgggtaaaaaactgtggaccgatggcgcggacggtgagcctatttccctctattgcgcttttaacgaactcgatgaagcgcgttttgtggttaaccgcatcaaaacctggcaggacaacggcggagcgcttgccgagtgcgccattctctaccgcagcaacgcccagagccgggtgctcgaagaggcgttattgcaggccagtatgccgtaccgtatttacggcgggatgcgcttcttcgaacgccaggaaatcaaagatgcgctcagctatctgcgcctgattgccaaccgcaacgacgacgcggcctttgagcgtgtggtgaatacgccaacgcggggtattggtgaccggacgctggacgtggtacgtcagacaagccgcgatcgccagttaacactctggcaggcatgtcgtgagctgttgcaggaaaaagccctcgccgggcgagctgccagcgccttgcagcgatttatggaattaatcgacgccttagcgcaggaaactgccgatatgccgctgcatgtacagactgaccgggtaattaaagactccggcctgcgtaccatgtatgagcaggagaagggcgaaaaaggtcagacgcgtatcgaaaacttagaggaactggtgacggcaacgcgccagttcagctacaacgaagaagacgaagatttaatgccgctgcaggcgttcctctcccatgcggcactggaagcaggtgaagggcaggcggatacctggcaggatgcggtgcagttgatgacgctacacagcgcgaaaggcctggagttcccgcaggtgtttatcgttggtatggaagagggcatgttcccaagccagatgagcctggatgaaggcgggcgtctggaagaagaacgccgtctggcctacgttggcgtaacccgcgcgatgcagaaactgacgctgacctacgcggaaacccgccgtctgtatggtaaagaggtttaccatcgcccgagccgctttatcggcgagctgccggaagagtgtgtggaagaggtgcgcctgcgcgccacggtaagccgcccggtcagccatcagcggatgggtacgccgatggtcgagaacgacagcggctacaagctcggccagcgcgtacgccacgctaagtttggtgaaggcaccattgtcaatatggaaggcagcggtgagcatagccgtttgcaggtggcatttcagggccagggtattaaatggctggtggcggcatacgcccggctggagagcgtgtaacgttgccggatgcggtgctgcgcaccttatttggcctaaaaaatcattcagattcaataaattgcaacgtcatgtaggccggatagggcgtttacgccgcatccggcatctgcgccatcttcagtatctgacacaaaactatcgttttaacctttccgctcgacggaaatcatggtgacaaaaggatagcgttgccacgggattgccccgcctttcatatacatatgactaatcgtgccatcaagataaagcagctgctcaacgttcagtttcgctttggcataacaggcaaaatcataaaaatttgttgcctgctggctcaacaaaaacacggcgttcccatgtttattaatcccaacaccgttacgaattttgctactggcgacgttgggatgaatacgcggattaattacaccgttttccatcaacattggcccactctgcaccgcaaactgaatctctttactggttttgaaggcatccagacgaacgatgccgactttatctcccgcgacataaaacacgccgccaggacggataaagaaattcccttcaccactagcgagatttaacgccaccttctgctgaccgttttcgatgtacaaaccgagcggcgcatagctttcatcatagatgccgccgttcatcgccatctgcacctgaccctgactattaatatccgccagcagagcatgtaacgttccccacgcttcgccattggctttttgccagtacattttcacccgctctgtttgaggattaacggtatacgcctgtacggtcagcgtcggatcactgagtgcgcaatcatcagcggcaacagcaaacaagggaggtaaggtgagggcgagaaaaatccgtttgagattcaaggtgatcattcctttaccaatgagtagctgatgcgccattataggtcctggatgtgggatttttttatcctgttagcgaccttgacgagtaccaaaaagcgcgaagttcaactattgttctgtggtgttctgttgcgtgttgacggcaaaattttgctggcgtaacatgcgcgcacgatcactctaagaggacattcgccttggacacacccagtagatactggctcactatcctgtcatccaggatcaactcctaaggctatccctttttgctgatagccttagcggttgtcagcgacctcaatttttcccgtcgcgctgagtcaggctgtttaatggtctgaaacccaatttgtttctgtgtgcccaccgaactgtccgatattttaagcattgggagtcccggtcatgctgagcgcatttcaactggaaaataaccgactgacccggctggaagtcgaagagagtcaaccccttgtaaatgcagtatggattgatcttgtcgaaccggacgacgacgagcgactgcgcgtacaatctgaacttggccagagcctggcaacccgcccggaactggaagacatcgaagcaagcgcacgtttctttgaagacgacgacggcctgcatattcactccttcttcttctttgaagatgcggaagatcacgccggtaactccactgtggcatttaccatccgtgatggtcgtctgtttactctgcgtgagcgtgaactgcccgcttttcgtctgtatcgtatgcgtgcccgtagccagagcatggtagacggtaacgcctacgagttgctgctggatctgttcgaaaccaaaatcgaacagttggcagatgaaattgaaaatatctatagcgacctggagcagttgagccgggtgattatggaagggcatcagggcgatgagtacgacgaggcgctctccactctggcggaactggaagatatcggctggaaagttcgcctgtgtctgatggatacccagcgcgcgctcaacttcctggtgcgtaaagcgcgtttaccgggtgggcaactggagcaggcgcgtgaaatcctgcgagatatcgaatccctgctgccgcataacgaatccctgttccagaaggtgaacttcctgatgcaggcggcaatgggttttatcaacatcgagcagaaccgcatcatcaaaatcttcagcgtggtatccgtggtattcctgccgccgacgctcgttgcttccagctatggcatgaactttgagtttatgccagaactgaagtggagcttcggctaccctggcgcgattatctttatgatcctcgcgggcctggcaccgtatctgtactttaagcggaagaactggttgtaaaaaacgagagcggtggcttagtctggctaagccacctgttattcaaaggctccaggtatttaacccttttacctctttctcatagaaccatttgttcgtgttaacagcaacataggctgctacggcaattcccagaatgttaacgccaattagtgcaccaacaaatagagatagaataccaagtaatagaactataattgcttttttccataaccccaggacaaataaatatatccaggaacagaagaaagcaatgaaattcatttgaatagttaagcgttgtcttacttttaatgctttaaatgctgctttatattctggtgttgccccccagaatccaggaaaaccatgttgatcataaaaattaaatcggtatttccatttttcacttaaactaccatcgttcatatattccttactcataaatactccataattattgtttactactatcagtaggtgcaagcattagcatactgaaagtggaaaaataacaaatcaaaaaaatcatgctaccattgccactacaggcaaaatcttcggctatcattgtgatgatagagatgatatatactgctaatgtaccaaaaacataagtttttatatagatgaaaccactatcacggagtcgctggcaattcatgttgatgacgagataatggagtacgatggtagagactataacaagaaagcctgcttctccatcgttaaaaaagataataagaaaggcaaaaatgaaatttattaaaataaaactaaatatataacgacgtctggaaatcttaccgttagatgttgggataaatatacgtaacataaattttacatccttgtatgagtctccggtcagcatggcaatatgcccactctcatgcaagagtcggcatattttttcagaatatatttattttttatttggacgttctacgctgcgtataaatcgcatccatcacaaaaattgccagcgccacccaaataaaggcgaaagtcaccatcttatcggcacccggtttttcaccataaaacgtcacagccagcaggaacatcagcgtcgggccaatgtactggaaaaagcctaacgtactgagacgcaagcgcgtggcagcggcggtaaaacacaacagcggtacggtagtgacaataccggcggcgatcagcagtaaattcaggctcatcgggttttgccccatatggctggtactgctgtcggcaatagcaaacaggtaaattgccgccacgggcagcagccacatggtttcgattaacatgccggtttgcgcttcaacggcaatcttcttgcgtaccagaccgtagaaggcaaaactaaatgccagtcccagcgcgataataggtaggctaccaaaagtccacagctggactaacacgccacatatcgccagaatcaccgccagccattgcatccggcggaatcgctcgccgaggaaaatcatccccagcacaatgttcaccagcgggttaataaagtaaccaaggctcgcttccagcatatggtgattgttcaccgcccagataaacagtagccagttgccaccaatcagcacggcagagactgccagcataaaaattttctgtggcgtctgaatcagcgtttttaaataggaccactggcggcaaatgctcatcagcaccaccataaagaaaaagctccagatcacgcgatgcgtcaggatttcatcggcgggcacgtagtaaatcaacttgaagtacgctggcgctataccccaaataaaataagcggcaagagcgagtaatacgccctgccgcgtttgttttgcatccatcgggaatactcatttttaattggtaacagcagtttacctgcttttatgtcttcaacctaccatataggtggcggtggcactggcaatataaagctgttcttcattgtgtaattcaacgcgggcgacggcgactttattgcctgcacgcaacaggctactagtagcagtaaaacgctcgcccctgcctgggcgcagataatcaacgcgaagatcaatggtccccatccggcttagccgctggcgtagttcatcttcactgatggtttcgtggcgggttaaggtacttcccacgcacaccagaccggcggcgacatccagcgcgctcgcaatgaccccgccgtgcaaaatgctttgcgcccagttgcccaccatcattggctgatttttaaaggccagctgtgcgaactctttttcgtaacgctccagttccatccccaatgcgcggttaaatggcatgtgataaacaaacatctcacccactaatttcagggcttgttcagcggtcagtacggcagacatatcatccttacacttcattggttaatgaaatgttgattttatgcttctttgttgttggtttctactttaggaagggataactaacggctatggagttaagtatgtaaaatagcccgcagaaaaatattcaccttatcaataattcgttacggagaacacgaccgatgcggactctgcagggctggttgttgccggtgtttatgttgcctatggcagtatatgcacaagaggcaacggtgaaagaggtgcatgacgcgccagcggtgcgtggcagtattatcgccaatatgctgcaggagcatgacaatccgttcacgctctatccttatgacaccaactacctcatttacacccaaaccagcgatctgaataaagaagcgattgccagttacgactgggcggaaaatgcgcgtaaggatgaagtaaagtttcagttgagcctggcatttccgctgtggcgtgggattttaggcccgaacagcgtgttgggtgcgtcttatacgcaaaaatcctggtggcaactgtccaatagcgaagagtctagtccgtttcgtgaaaccaactacgaaccgcaattgttcctcggttttgccaccgattaccgttttgcaggttggacgctgcgcgatgtggagatggggtataaccacgactctaacgggcgttccgacccgacctcccgcagctggaaccgcctttatactcgcctgatggcagaaaacggtaactggctggtagaagtgaagccgtggtatgtggtgggtaatactgacgataacccggatatcaccaaatatatgggttactaccagcttaaaatcggctatcacctcggtgatgcggtgctcagtgcgaaaggacagtacaactggaacaccggctacggcggcgcggagttaggcttaagttacccgatcaccaaacatgtgcgcctttatactcaggtttacagcggctatggcgaaagcctcatcgactataacttcaaccagacccgtgtcggtgtgggggttatgctaaacgatttgttttgatgaacggttgagtggttggcaaatctggaatccagcatccaggattaccctctcagagactaaaagcattgcagtttctcgcgcaggcgctgaaaatagcgcctgtttttatttcaggcaatcggggtgaatgtggcgcaggcggaagtgttgaatctggagtccggagctaaacaggttttacaagaaacctttggctaccaacagtttcgccccggccaggaagaaattatcgacactgtgctttccggccgcgattgcctcgtcgtcatgcccactggtggcggaaaatccctttgctatcaaatccctgccttattgctaaacggccttaccgtggttgttagtccgctgattagcttgatgaaagatcaggtggatcaactgcaagccaacggcgtggcggcggcgtgccttaacagcacgcaaacccgcgaacagcaacttgaagtgatgacaggctgccgcaccgggcaaattcgtctgctttatatcgccccggaacgcctgatgctggataactttcttgagcatctggcgcactggaatccggtgttattagccgttgatgaagcgcactgtatctcccaatggggccacgatttccgcccggaatatgccgcgctcggtcagttgcgccagcggttcccgacgctgccgtttatggcgctgaccgccacagccgacgacaccacgcgccaggatatcgtgcgcctgctggggctgaacgatccgctgattcaaatcagcagttttgaccgtccgaatattcgctacatgctgatggagaagttcaaaccgctcgatcagttgatgcgctacgtgcaggaacagcgcggtaagagtggcattatctactgcaacagccgcgcgaaagtagaagacaccgctgcgcgcctgcaaagcaagggaattagcgcggcggcctatcatgccgggctggaaaataatgttcgcgccgatgtgcaggaaaaattccagcgcgatgacctgcaaattgtggtggcgacggtggcgttcggcatgggcatcaataaaccaaacgttcgcttcgtggtccactttgatattccgcgcaatatcgaatcctattatcaggaaaccggacgcgccgggcgtgatggcctgcccgcggaagcgatgctgttttacgatccggctgatatggcgtggctgcgccgttgtctggaagagaagccgcaggggcagttgcaggatatcgagcgccacaaactcaatgcgatgggcgcgtttgccgaagcgcaaacttgccgtcgtctggtattgctgaactattttggcgaagggcgtcaggagccgtgcgggaactgcgatatctgcctcgatccgccgaaacagtacgacggtagtaccgatgctcagattgccctttccaccattggtcgtgtgaatcagcggtttgggatgggttatgtggtggaagtgattcgtggtgctaataaccagcgtatccgcgactatggtcatgacaaactgaaagtctatggcatgggccgtgataaaagccatgaacattgggtgagcgtgatccgccagctgattcacctcggcctggtgacgcaaaatattgcccagcattctgccctacaactgacagaggccgcgcgcccggtgctgcgcggcgaatcctctttgcaacttgccgtgccgcgtatcgtggcgctcaaaccgaaagcgatgcagaaaagcttcggcggcaactatgatcgcaaactgttcgccaaattacgcaaactgcgtaaaagcatagccgatgaaagtaatgtcccgccgtacgtggtgtttaacgacgcaaccttgattgagatggctgaacagatgccgatcaccgccagcgaaatgctcagcgttaacggcgttgggatgcgcaagctggaacgctttggcaaaccgtttatggcgctgattcgtgcgcatgttgatggcgatgacgaagagtaatcagcagcataaaaaagtgccagtatgaagactccgtaaacgtttcccccgcgagtcaaatgtatgttgatgttatttctcaccgtcgccatggtgcacattgtggcgcttatgagccccggtcccgatttcttttttgtctctcagaccgctgtcagtcgttcccgtaaagaagcgatgatgggcgtgctgggcattacctgcggcgtaatggtttgggctgggattgcgctgcttggcctgcatttgattatcgaaaaaatggcctggctgcatacgctgattatggtgggcggtggcctgtatctctgctggatgggttaccagatgctacgtggtgcactgaaaaaagaggcggtttctgcacctgcgccacaggtcgagctggcgaaaagtgggcgcagtttcctgaaaggtttactgaccaatctcgctaatccgaaagcgattatctactttggcagcgtgttcagtttgtttgtcggtgataacgttggcactaccgcgcgctggggcatttttgcgctgatcattgtcgaaacgctggcgtggtttaccgtcgttgccagcctgtttgccctgccgcaaatgcgccgtggttatcaacgtctggcgaagtggattgatggttttgccggggcgttatttgccggatttggcattcatttgattattagccggtgatgccagacgcgtcttcagagtaagtcggataaggcgtttacgccgcatccgacattatttttcacgcatgcctcgcgcttgctaacagcgctcccaccagcataaacaagctgccgaaaatcttattcagcgccttcatctgctttggtcctttaatccatagagcaatccgttgagcaagggtggcgtaaccgatcatcacaataatatcgaccacaatagtggtgacgccgagcacgatatactgcatcagttgcggctgttgcggcatgatgaattgcggaaatagcgccgccagaaacacaatacttttgggattggtgagattcacaaaaactgcgcgctggaacaaatgtcgacggctttgagtagaggccaggcttttaaggtcaattgcaccagcggcgcgccactgctggattcccagccaaatcaagtaagccgcgcctgcccacttcaacacttcaaacgcaatcacactgcgggaaaatagcgtccccaaccccacgccaaccagcacaatatgaatcgccagtccggtctgaagcccagcaatagacgccaccgcgccgcgataaccgtggttgaggctggtggtcatagtgttgattgcaccagagcctgggctcaggcttaaaatgatgcttgtcagcaggtaggcaaaccaccattctaaggtcatgatgaactcccggtgtgtctatttttgtgccacaatacgctactgtcgcagcgttgtgtcaggcacgctaaaaaaaacgattttacgtggtttaagaggcagattacccgatgtttcagcagcaaaaagactgggaaacaagagaaaacgcgtttgctgcttttaccatgggaccgctgactgatttctggcgtcagcgtgatgaagcagagtttactggtgtggatgacattccggtgcgctttgtccgttttcgcgcacagcaccatgaccgggtggtagtcatctgcccggggcgtattgagagctacgtaaaatatgcggaactggcctatgacctgttccatttggggtttgatgtcttaatcatcgaccatcgcgggcagggacgttccggtcgcctgttagccgatccgcatctcgggcatgttaatcgctttaatgattatgttgatgatctggcggcattctggcagcaggaggttcagcccggtccgtggcgtaaacgctatatactggcacatagcatgggcggtgcgatctccacattatttctgcaacgccatccaggtgtatgtgacgccattgcgctaactgcgccaatgtttgggatcgtgattcgtatgccgagttttatggcacggcagatcctcaactgggccgaagcgcatccacgtttccgtgatggctatgcaataggcaccgggcgctggcgcgcgttgccgtttgctatcaacgtactgacccacagcagacagcgatatcgacgtaacttacgcttctatgctgatgacccaacgattcgcgtcggtgggccgacctaccattgggtacgcgaaagtattctggctggcgaacaggtgttagccggtgcgggtgatgacgccacgccaacgcttctcttgcaggctgaagaggaacgcgtggtggataaccgcatgcatgaccgtttttgtgaactccgcaccgccgcgggccatcctgtcgaaggaggacggccgttggtaattaaaggtgcttaccatgagatcctttttgaaaaggacgcaatgcgcagtgtcgcgctccacgccatcgttgattttttcaacaggcataacagtcccagcggaaaccgctctacagaggtttaaatttcttatgtaccaggttgttgcgtctgatttagatggcacgttactttctcccgaccatacgttatccccttacgccaaagaaactctgaagctgctcaccgcgcgcggcatcaactttgtgtttgcgaccggtcgtcaccacgttgatgtggggcaaattcgcgataatctggagattaagtcttacatgattacctccaatggtgcgcgcgttcacgatctggatggtaatctgatttttgctcataacctggatcgcgacattgccagcgatctgtttggcgtagtcaacgacaatccggacatcattactaacgtttatcgcgacgacgaatggtttatgaatcgccatcgcccggaagagatgcgcttttttaaagaagcggtgttccaatatgcgctgtatgagcctggattactggagccggaaggcgtcagcaaagtgttcttcacctgcgattcccatgaacaactgctgccgctggagcaggcgattaacgctcgttggggcgatcgcgtcaacgtcagtttctctaccttaacctgtctggaagtgatggcgggcggcgttagtaaaggccatgcgctggaagcggtggcgaagaaactgggctacagcctgaaggattgtattgcgtttggtgacgggatgaacgacgccgaaatgctgagcatggcggggaaaggctgcattatgggcagtgcgcaccagcgtctgaaagaccttcatcccgagctggaagtgattggtactaatgccgacgacgcggtgccgcattatctgcgtaaactctatttaagctaatcgttctttatttggtcagttgtcaacctgatacttcgctacaatggatacccgttaatcaaagagttttccattgtggcgctacttatcatcaccacgattctgtgggccttctcctttagcttttatggcgagtaccttgcggggcacgtcgatagctattttgcggtgctggtgcgcgttggcctggcggcactcgtttttctgccgtttctgcgtacccgtggcaatagcctgaaaacggtcggcctgtatatgctggtgggcgcgatgcagcttggcgtgatgtatatgctgagtttccgcgcttatctctacctgacggtttccgagctgctgctgttcaccgtgctgacgccgctctacatcacgctgatttatgacatcatgagtaagcgccgtctgcgctggggctatgcctttagcgccttgctggcggtgattggtgccgggattattcgctatgatcaggtcaccgaccatttctggactggcttgctgctggtgcaactctccaatatcacttttgccattggcatggtgggttacaaacgcctgatggaaactcgcccgatgccacagcataacgcctttgcgtggttctatcttggcgcgtttctggtggcagtgattgcatggttcttgctgggaaatgcgcagaaaatgccgcaaaccacgctgcaatggggcattctggtgtttcttggcgtggtggcttccgggattggctactttatgtggaactacggcgcgacgcaggtggacgccggaacgctgggcattatgaataatatgcacgttccggcagggctgctggtaaacctggctatctggcaccaacagccgcactggccaacgtttattacaggcgcgctggtgatcctggccagtctgtgggtgcatcgtaagtgggtcgctccgcgctctagtcaaacggcagatgatcgcaggcgtgattgcgcgctgagcgaataattacaggcgcgctggacttcctggcctcactgtgggtgcatcgtaagtgggtcgctccgcgctcttcacaaacggcagatgatcgcaggcgtgattgcgcgcactgcgaataaacgcttccgtaactggctgacgctgctcgccatcgcgcacggcggcgtacagtcggctccacaagccttcgcccagggttttggtcaccaccagaccctggcgctcaaaactctctactacccaatgcggtagcgcggcaatacccatccgcgcggcaaccatctgaatcaacaataaggtgttatcgacgcttttcagactcgggctgacgcctgccggctgaagaaaatgccgccagacatccagtcgactacgctgcaccggataaattaatagcgtctcgctggcgagatcttccggtgtaattcgcgttttcgccgccagtggatggtcaggtgctaacaccagacgcacttcatagtcgaacatcgggctataatgcaggccactgcgcggcagaatatcggacgtcattaccagatccagctctccctgttgcaaggcgggctgcgggtcaaatgtcacgccgcttttaaaatccatctctacctgcggccagttcttatggaaattttctaacgcgggtgtcagccactgaatacagctatggcactcaatggcaatgcgcagacgcgtctgctgcggttcattgcaggcttgcagggcctggctaatttgcggcagtacctggtttgccagttgcaacaggatttctccctgcggtgtaaagcgtagcggctggctcttacgcacaaatagccggaagccaaggcgttgttccagatcgctaaactggtgagacagggcggattgcgtctgatgcaacgtcgccgcagcggctgcgaggctgccgcagttccgcaacgcttgtagcgttttcaggtgttttacttcgatcatgaaagtccttcacttcggcatgaataatttgcgcttgaggaatatacagtaaccgccaattatggatgtgtaaacatctggacggctaaaatccttcgtcttttaaatttatggtgcgttggctgcgtttctccaccccggtcacttacttcagtaagctcccggggatgaataaacttgccgccttccctaaattcaaaatccataggatttacatataattagaggaagaaaaaatgacaatattgaatcacaccctcggtttccctcgcgttggcctgcgtcgcgagctgaaaaaagcgcaagaaagttattgggcggggaactccacgcgtgaagaactgctggcggtagggcgtgaattgcgtgctcgtcactgggatcaacaaaagcaagcgggtatcgacctgctgccggtgggcgattttgcctggtacgatcatgtactgaccaccagtctgctgctgggtaacgttccggcgcgtcatcagaacaaagatggtagcgtagatatcgacaccctgttccgtattggtcgtggacgtgcgccgactggcgaacctgcggcggcagcggaaatgaccaaatggtttaacaccaactatcactacatggtgccggagttcgttaaaggccaacagttcaaactgacctggacgcagctgctggacgaagtggacgaggcgctggcgctgggccacaaggtgaaacctgtgctgctggggccggttacctggctgtggctggggaaagtgaaaggtgaacaatttgaccgcctgagcctgctgaacgacattctgccggtttatcagcaagtgctggcagaactggcgaaacgcggcatcgagtgggtacagattgatgaacccgcgctggtactggaactaccacaggcgtggctggacgcatacaaacccgcttacgacgcgctccagggacaggtgaaactgctgctgaccacctattttgaaggcgtaacgccaaatctcgacacgattactgcgctgcctgttcagggtctgcatgttgacctcgtacatggtaaagatgacgttgctgaactgcacaagcgcctgccttctgactggttgctgtctgcgggtctgatcaatggtcgtaacgtctggcgcgccgatcttaccgagaaatatgcgcaaattaaggacattgtcggcaaacgtgatttgtgggtggcatcttcctgcagcttgctgcacagccccatcgacctgagcgtggaaacgcgtcttgatgcagaagtgaaaagctggtttgccttcgccctacaaaaatgccatgaactggcactgctgcgcgatgcgctgaacagtggtgacacggcagctctggcagagtggagcgccccgattcaggcacgtcgtcactctacccgcgtacataatccggcggtagaaaagcgtctggcggcgatcaccgcccaggacagccagcgtgcgaatgtctatgaagtgcgtgctgaagcccagcgtgcgcgttttaaactgccagcgtggccgaccaccacgattggttccttcccgcaaaccacggaaattcgtaccctgcgtctggatttcaaaaagggcaatctcgacgccaacaactaccgcacgggcattgcggaacatatcaagcaggccattgttgagcaggaacgtttgggactggatgtgctggtacatggcgaggccgagcgtaatgacatggtggaatactttggcgagcacctcgacggatttgtctttacgcaaaacggttgggtacagagctacggttcccgctgcgtgaagccaccgattgtcattggtgacattagccgcccggcaccgattaccgtggagtgggcgaagtatgcgcaaagcctgaccgacaaaccggtgaaagggatgctgacggggccggtgaccatactctgctggagcttcccgcgtgaagatgtcagccgtgaaaccatcgccaaacagattgcgctggcgctgcgtgatgaagtggccgatctggaagccgctggaattggcatcatccagattgacgaaccggcgctgcgcgaaggtttaccgctgcgtcgtagcgactgggatgcgtatctccagtggggcgtagaggccttccgtatcaacgccgccgtggcgaaagatgacacacaaatccacactcacatgtgttattgcgagttcaacgacatcatggatagcattgcggcgctggacgcagacgtcatcaccatcgaaaccagccgttccgacatggagttgctggagagctttgaagagtttgattatccaaatgaaatcggtcctggcgtctatgacattcacagcccaaacgtaccgagcgtggaatggattgaagccttgctgaagaaagcggcaaaacgcattccggcagagcgcctgtgggtcaacccggactgtggcctgaaaacgcgcggctggccagaaacccgcgcggcactggcgaacatggtgcaggcggcgcagaacttgcgtcgggggtaaaatccaaaccgggtggtaataccacccggtcttttctcattacaggctcttcttcccaccatactgcttaaaccattccagcatacgctgccagccatcttctgcagatgcggcatgatagctcgggcgataatcagcgttgaatgcatgcccggcgtccgggtacacgataatctctgctttcgcattagcagcccgcagcgcctggcgcatggtttcaacgctctcctgcggaatgctgttatcctgaccaccatataagccgagaatcggcgcgttaagatcggttgcgatatcaacaggttgtttcggactattcaggctcttgtcgcccgtcagtttgccgtaccacgccactgcggcttttagctgtggattatgcgcggcatacagccaggtgatacgtccaccccagcagaatccggtgatcattaaacgatgaacatcgccgccgttgcgggaagcccaactggcgacatgatcgagatcggccagcacctggctgtcaggcacttttgctaccagaccgctaagcaacgtggggatatcggcaaaatcattcggatcgccttcgcggaagtaaagttcaggtgcgatagccagatacccctccagcgccagacggcgacaaatgtcgcggatatgttcatgcacgccaaaaatttcctgcactacaatgaccactggcagtgggccatcgctttgctttggtctggcatggtaagcaggcatgttatccccttgactagggatagaggtgaagcccgccacaatcgcgtcgtccggggtctgaacgatggtgctagcgagagggcttgcagcaggtgcaaatccagattgttgtgttgttgccatggtattctccgtacccttataaaaatgttgcgcaatgttaactatagtcagcatgcaacaaatcacattgcctgaatcggctcatcttttatgcagtcctgcagaatgaagggtgatttatgtgatttgcatcacttttggtgggtaaatttatgcaacgcatttgcgtcatggtgatgagtatcacgaaaaaatgttaaacccttcggtaaagtgtctttttgcttcttctgactaaaccgattcacagaggagttgtatatgtccaagtctgatgtttttcatctcggcctcactaaaaacgatttacaaggggctacgcttgccatcgtccctggcgacccggatcgtgtggaaaagatcgccgcgctgatggataagccggttaagctggcatctcaccgcgaattcactacctggcgtgcagagctggatggtaaacctgttatcgtctgctctaccggtatcggcggcccgtctacctctattgctgttgaagagctggcacagctgggcattcgcaccttcctgcgtatcggtacaacgggcgctattcagccgcatattaatgtgggtgatgtcctggttaccacggcgtctgtccgtctggatggcgcgagcctgcacttcgcaccgctggaattcccggctgtcgctgatttcgaatgtacgactgcgctggttgaagctgcgaaatccattggcgcgacaactcacgttggcgtgacagcttcttctgataccttctacccaggtcaggaacgttacgatacttactctggtcgcgtagttcgtcactttaaaggttctatggaagagtggcaggcgatgggcgtaatgaactatgaaatggaatctgcaaccctgctgaccatgtgtgcaagtcagggcctgcgtgccggtatggtagcgggtgttatcgttaaccgcacccagcaagagatcccgaatgctgagacgatgaaacaaaccgaaagccatgcggtgaaaatcgtggtggaagcggcgcgtcgtctgctgtaattctcttctcctgtctgaaggccgacgcgttcggccttttgtatttttgcgtagcgcctcgcaggaaatgcctttccaactggacgtttgtacagcacaattctattttgtgcgggtaagttgttgcgtcaggaggcgttgtggatttcagtatcatggtttacgcagttattgcgttggtgggtgtggcaattggctggctgtttgccagttatcaacatgcgcagcaaaaagccgagcaattagctgaacgtgaagagatggtcgcggagttaagcgcggcaaaacaacaaattacccaaagcgagcactggcgtgcagagtgcgagttactcaataacgaagtgcgcagcctgcaaagtattaacacctctctggaggccgatctgcgtgaagtaaccacgcggatggaagccgcacagcaacatgctgacgataaaattcgccagatgattaacagcgagcagcgcctcagtgagcagtttgaaaacctcgccaaccgtatttttgagcacagcaatcgccgggttgatgagcaaaaccgtcagagtctgaacagcctgttgagcccgctacgtgaacaactggacggtttccgccgtcaggttcaggacagcttcggtaaagaagcacaagaacgccataccctgacccacgaaattcgcaatctccagcaactcaacgcgcaaatggcccaggaagcgatcaacctgacgcgcgcgctgaaaggcgacaataaaacccagggcaactggggcgaggtagtattgacgcgggtgttggaggcttccggtctgcgtgaagggtatgaatatgaaacccaggtcagcatcgaaaatgacgcccgcagccggatgcagccggatgtcatcgtgcgcctgccgcagggaaaagatgtggtgatcgacgccaaaatgacgctggtcgcctatgaacgctattttaacgccgaagacgactacacccgcgaaagcgcgctacaggaacatatcgcgagcgtgcgtaaccatatccgtttgctgggacgcaaagattatcaacagctgccggggctgcgaactctggattacgtgctgatgtttattcccgttgaacccgcttttttactggcgcttgaccgccagccggagctgatcaccgaagcgttgaaaaacaacatcatgctggttagcccgactacgctgctggtggcgctgcgcactatcgccaacctgtggcgttatgagcatcaaagccgcaacgcccagcaaatcgccgatcgtgccagcaagctgtacgacaagatgcgtttgttcatcgatgacatgtccgcgattggtcaaagtctcgacaaagcgcaggataattatcggcaggcaatgaaaaaactctctagtgggcgcggaaatgtgctggcgcaggcagaagcgtttcgcggtttaggagtagaaattaaacgcgagattaatccggatttggctgaacaggcggtgagccaggatgaagagtatcgacttcggagcgttccggagcagccgaatgatgaagcttatcaacgcgatgatgaatataatcagcagagccgctaacccattgggagtagttaagccgggtagaaatctagggcatcgacgcccaatctgttacacttctggaacaattttttgatgagcaggcattgagatggtggataagagtcaagaaacgacgcactttggttttcagaccgtcgcgaaggaacaaaaagcggatatggtcgcccacgttttccattccgtggcaagtaaatacgatgtcatgaatgatttgatgagttttggtattcatcgtttgtggaagcgattcacgattgattgcagcggcgtacgccgtgggcagaccgtgctggatctggctggtggcaccggcgacctgacagcgaaattctcccgcctggtcggagaaactggcaaagtggtccttgctgatatcaatgaatccatgctcaaaatgggccgcgagaagctgcgtaatatcggtgtgattggcaacgttgagtatgttcaggcgaacgctgaggcgctgccgttcccggataacacctttgattgcatcaccattagctttggtctgcgtaacgtcaccgacaaagataaagcactgcgtagtatgtatcgcgtgctgaaacccggcggccgcctgctggtgcttgagttcagcaagccaattatcgagccgctgagcaaagcctatgatgcatactccttccatgtgctgccgcgtattggcagtctggtcgcgaacgacgccgacagctaccgttatctggcagaatccatccgtatgcatcccgatcaggataccctgaaagccatgatgcaggatgccggattcgaaagtgtcgactactacaatctgacggcaggggttgtggcgctgcatcgtggttataagttctgacaggagaccggaaatgccttttaaacctttagtgacggcaggaattgaaagtctgctcaacaccttcctgtatcgcagtcccgcgctgaaaacggcccgcagccgtctgctgggtaaagtattgcgcgtggaggtaaaaggctttagcacgagtttgattctggtgttcagcgaacgccaggttgatgtactgggcgaatgggcaggcgatgctgactgcaccgttatcgcctacgccagtgtgttgccgaaacttcgcgatcgccagcagcttaccgcactgattcgcagtggtgagctggaagtgcagggcgatattcaggtggtgcaaaacttcgttgcgctggcagatctggcagagttcgaccctgcggaactgctggccccttataccggtgatatcgccgctgaaggaatcagcaaagccatgcgcggaggcgcaaagttcctgcatcacggcattaagcgccagcaacgttatgtggcggaagccattactgaagagtggcgtatggcacccggtccgcttgaagtggcctggtttgcggaagagacggctgccgtcgagcgtgctgttgatgccctgaccaaacggctggaaaaactggaggctaaatgacgccaggtgaagtacggcgcctatatttcatcattcgcacttttttaagctacggacttgatgaactgatccccaaaatgcgtatcaccctgccgctacggctatggcgatacagtttattctggatgccaaatcggcataaagacaaacttttaggtgagcgactacgactggccctgcaagaactggggccggtttggatcaagttcgggcaaatgttaagtacccgccgcgatctttttccaccgcatattgccgatcagctggcgttattgcaggacaaagttgctccgtttgatggcaagctggcgaagcagcagattgaagctgcaatgggcggcttgccggtagaagcgtggtttgacgattttgaaatcaagccgctggcttctgcttctatcgcccaggttcataccgcgcgattgaaaagcaatggtaaagaggtggtgattaaagtcatccgcccggatattttgccggttattaaagcggatctgaaacttatctaccgtctggctcgctgggtgccgcgtttgctgccggatggtcgccgtctgcgcccaaccgaagtggtgcgcgagtacgaaaagacattgattgatgaactgaatttgctgcgggaatctgccaacgccattcagcttcggcgcaattttgaagacagcccgatgctctacatcccggaagtttaccctgactattgtagtgaagggatgatggtgatggagcgcatttacggcattccggtgtctgatgttgcggcgctggagaaaaacggcactaacatgaaattgctggcggaacgcggcgtgcaggtgttcttcactcaggtctttcgcgacagctttttccatgccgatatgcaccctggcaacatcttcgtaagctatgaacacccggaaaacccgaaatatatcggcattgattgcgggattgttggcagcctaaacaaagaagataaacgctatctggcagaaaactttatcgccttctttaatcgcgactatcgcaaagtggcagagctacacgtcgattctggctgggtgccaccagataccaacgttgaagagttcgaatttgccattcgtacggtctgtgaacctatctttgagaaaccgctggccgaaattagctttggacatgtactgttaaatctgtttaatacggcgcgtcgcttcaatatggaagtgcagccgcaactggtgttactccagaaaaccctgctctacgtcgaaggggtaggacgccagctttatccgcaactcgatttatggaaaacggcgaagcctttcctggagagctggattaaagatcaggtcggtattcctgcgctggtgagagcatttaaagaaaaagcgccgttctgggtcgaaaaaatgccagaactgcctgaattggtttacgacagtttgcgccagggcaagtatttacagcacagtgttgataagattgcccgcgagcttcagagtaatcatgtacgtcagggacaaagccgttattttctcggaattggcgctacgttagtattaagtggcacattcttgttggtcagccgacctgaatgggggctgatgcccggctggttaatggcaggtggtctgatcgcctggtttgtcggttggcgcaaaacacgctgattttttcatcgctcaaggcgggccgtgtaacgtataatgcggctttgtttaatcatcatctaccacagaggaacatgtatgggtggtatcagtatttggcagttattgattattgccgtcatcgttgtactgctttttggcaccaaaaagctcggctccatcggttccgatcttggtgcgagcatcaaaggctttaaaaaagcaatgagcgatgatgaaccaaagcaggataaaaccagtcaggatgctgattttactgcgaaaactatcgccgataagcaggcggatacgaatcaggaacaggctaaaacagaagacgcgaagcgccacgataaagagcaggtgtaatccgtgtttgatatcggttttagcgaactgctattggtgttcatcatcggcctcgtcgttctggggccgcaacgactgcctgtggcggtaaaaacggtagcgggctggattcgcgcgttgcgtagtctggcgacaacggtgcagaacgaactgacccaggagttaaaactccaggagtttcaggacagtctgaaaaaggttgaaaaggcgagcctcactaacctgacgcccgaactgaaagcgagcatggatgaactacgccaggccgcggagagcatgaagcgttcctacgttgcaaacgatcctgaaaaggcgagcgatgaagcgcacaccatccataacccggtggtgaaagataatgaagctgcgcatgagggcgtaacgcctgccgctgcacaaacgcaggccagtagcccggaacagaagccagaaaccacgccagagccggtggtaaaacctgctgcggacgctgaaccgaaaaccgctgcaccttcccctagcagcagtgataaaccgtaaacatgtctgtagaagatactcaaccgcttatcacgcatctgattgagctgcgtaagcgtctgctgaactgcattatcgcggtgatcgtgatattcctgtgtctggtctatttcgccaatgacatctatcacctggtatccgcgccattgatcaagcagttgccgcaaggtagtacgatgatcgccaccgacgtggccagcccgttctttacgccgatcaagctgacctttatggtgagcctgattctgagtgcgccggtgattctctatcaggtgtgggcatttatcgccccagcgctgtataagcatgaacgtcgcctggtggtgccgctgctggtttccagctctctgctgttttatatcggcatggcattcgcctactttgtggtctttccgctggcatttggcttccttgccaataccgcgccggaaggggtgcaggtatccaccgacatcgccagctatttaagcttcgttatggcgctgtttatggcgtttggtgtctcctttgaagtgccggtagcaattgtgctgctgtgctggatggggattaccagcccagaagacttacgcaaaaaacgcccgtatgtgctggttggtgcattcgttgtcgggatgttgctgacgccgccggatgtcttcagccaaacgctgttggcgatcccgatgtactgtctgtttgaaatcggtgtcttcttcagtcgcttttacgttggtaaagggcgaaatcgggaagaggaaaacgacgctgaagcagaaagcgaaaaaactgaagaataaattcaaccgcccgtcagggcggttgtcatatggagtacaggatgtttgatatcggcgttaatttgaccagtagccaatttgcgaaagaccgtgatgatgttgtagcgtgcgcttttgacgcgggagttaatgggctactcatcaccggcactaacctgcgtgaaagccagcaggcgcaaaagctggcgcgtcagtatagctcctgttggagtacggcgggcgtacatcctcacgacagcagccagtggcaagctgcgactgaagaagcgattattgagctggccgcgcagccagaagtggtggcgactggtgaatgtggtctcgactttaaccgcaactttagcacgccggaagagcaggaacgcgcttttgttgcccagctacgcattgccgcagatttaaacatgccggtatttatgcactgtcgcgatgcccacgagcggtttatgacattgctggagccgtggctggataaactgcctggtgcggttcttcattgctttaccggcacacgcgaagagatgcaggcgtgcgtggcgcatggaatttatatcggcattaccggttgggtttgcgatgaacgacgcggactggagctgcgggaacttttgccgttgattccggcggaaaaattactgatcgaaactgatgcgccgtatctgctccctcgcgatctcacgccaaagccaagttcccggcgcaacgagccagcccatctgccccatattttgcaacgtattgcgcactggcgtggagaagatgccgcatggctggctgccaccacggatgctaatgtcaaaacactgtttgggattgcgttttaaagtttgcggaactcggtattcttcacactgtgcttaatctctttattaataagattaagcaatagcatggagcgagcctcaccatcgggttcggtgaaaatggcctgaaagccttcgaacgcgccttcggtaataatcaccttatcacccggataaggggttgccggatcgacaatgtctttcggtttatatacgcttagctgatgaataaccgcgcttgggactatcgctgggctcgcgccaaagcgcacgaagtggctgacaccgcgggtcgcgttgatagtcgtggtatgaatcacttctgggtcaaattccacaaacaggtagttggggaacaatggctcactgactgcagtacgttttccacgcacgattttttccagggtgatcatcggtgccaggcaattcacagcctgtctttcgaggtgttcctgggcacgttgaagttgcccgcgcttgcagtacagtaaataccaggattgcataatgactcttatccgtttaatcggggcgcaaggatagcaaaagctttacgctaagttaattatattccccggtttgcgttataccgtcagagttcacgctaatttaacaaatttacagcatcgcaaagatgaacgccgtataatgggcgcagattaagaggctacaatggacgccatgaaatataacgatttacgcgacttcttgacgctgcttgaacagcagggtgagctaaaacgtatcacgctcccggtggatccgcatctggaaatcactgaaattgctgaccgcactttgcgtgccggtgggcctgcgctgttgttcgaaaaccctaaaggctacagtatgccggtgctgtgcaacctgttcggtacgccaaagcgcgtggcgatgggcatggggcaggaagatgttagcgcgctgcgtgaagttggtaaattattggcgtttctgaaagagccggagccgccaaaaggtttccgcgacctgtttgataaactgccgcagtttaagcaagtattgaacatgccgacaaagcggctgcgtggtgcgccctgccaacaaaaaatcgtctctggcgatgacgtcgatctcaatcgcattcccattatgacctgctggccggaagatgccgcgccgctgattacctgggggctgacagtgacgcgcggcccacataaagagcggcagaatctgggcatttatcgccagcagctgattggtaaaaacaaactgattatgcgctggctgagccatcgcggcggcgcgctggattatcaggagtggtgtgcggcgcatccgggcgaacgtttcccggtttctgtggcgctgggtgccgatcccgccacgattctcggtgcagtcactcccgttccggatacgcttagtgagtatgcgtttgccggattgctacgtggcaccaagaccgaagtggtgaagtgtatctccaatgatcttgaagtgcccgccagtgcggagattgtgctggaagggtatatcgaacaaggcgaaactgcgccggaagggccgtatggcgaccacaccggttactataatgaagtcgatagtttcccggtatttaccgtgacgcatattacccagcgtgaagatgcgatttaccattccacctataccgggcgtccgccagatgagcccgcggtgctgggtgtcgcactgaacgaagtgtttgtgccgattctgcaaaaacagttcccggaaattgtcgatttttacctgccgccggaaggctgctcttatcgcctggcggtagtgacaatcaaaaaacagtacgccggacacgcgaagcgcgtcatgatgggcgtctggagcttcttacgccagtttatgtacactaaatttgtgatcgtttgcgatgatgacgttaacgcacgcgactggaacgatgtgatttgggcgattaccacccgtatggacccggcgcgggatactgttctggtagaaaatacgcctattgattatctggattttgccagccctgtctccgggctgggtagtaaaatggggctggatgccacgaataaatggccgggggaaacccagcgtgaatggggacgtcccatcaaaaaagatccagatgttgtcgcgcatattgacgccatctgggatgaactggctatttttaacaacggtaaaagcgcctgatgcgcgtttgttttgccctatttatcgatccgacagagaaagcgcatgacaaccttaagctgtaaagtgaccagcgtagaagctatcacggataccgtatatcgtgtccgcatcgtgccagacgcggccttttcttttcgtgctggtcagtatttgatggtagtgatggatgagcgcgacaaacgtccgttcagtatggctagcacgccggatgaaaaagggtttatcgagctgcatattggcgcttctgaaatcaacctttacgcgaaagcagtcatggaccgcatcctcaaagatcatcaaatcgtggtcgacattccccacggagaagcgtggctgcgcgatgatgaagagcgtccgatgattttgattgcgggcggcaccgggttctcttatgcccgcagcattttgctgacagcgttggcgcgtaacccaaaccgtgatatcaccatttactggggcgggcgtgaagagcagcatctgtatgatctctgcgagcttgaggcgcttagcttgaagcatcctggtctgcaagtggtgccggtggttgaacaaccggaagcgggctggcgtgggcgtactggcaccgtgttaacggcggtattgcaggatcacggtacgctggcagagcatgatatctatattgccggacgttttgagatggcgaaaattgcccgcgatctgttttgcagtgagcgtaatgcgcgggaagatcgcctgtttggcgatgcgtttgcatttatctgagatataaaaaaacccgcccctgacaggcgggaagaacggcaactaaactgttattcagtggcatttagatctatgacgtatctggcaaaccatgcccgatgcgacgctgtcgcgtcttatcgtgcctacaaatagtccgaaccgtaggccggataaggcgtttacgccgcatccggcaattggtgcatgatgcctgatgcgacgctgtcgcgtcttatcgtgcctacaaatagtccgaaccgtaggccggataaggcgtttacgccgcatccggcaattggtgcatgatgcctgatgcgacgctggcgcgtcttatcaggcctacattggtgccggatcggtagaccggataaggcgttcacgccgcatccggcaagtggttaaacccgctcaaacaccgtcgcaataccctgacccagaccgatacacatcgtcgccagaccaaactgaacgtctttgcgttccatcagattcagcagcgtggtgctgatacgcgcaccggaacaacccagcggatgacccagcgcgatcgcgccaccgttgaggttgatcttctcgtcaatctgctcaattagtcccagatctttaatacatggcaggatctgcgcggcaaaggcttcgttcatttcaaacacgccgatatcgctggcagaaagccccgcttttttcagcgccagtttgctggccggaaccgggccgtaacccataatgcttgggtcacaaccaacgaccgccatgctacgcacacgagcgcgcggcttaagacctaattcatgggcgcggctttcactcatcaccagcatggcagctgcgccatcggaaagtgcagaagatgtgcccgccgttaccataccgtttactggatcaaacgccggacgcagcgtggcgagggcttccacggtggtttccgggcgaatcacttcgtcgtaattaaactgcttcaggacgccgtcggcatcgtgaccaccggtcgggatgatttcatttttaaatgcggcgctctgcgtggcggcccaggcgcgggcgtgactccgcgcggcaaaggcatcctgcatttcacggctgataccgtgcatacgcgccagcatttctgccgttaagcccatcatgcccgccgctttggcgacattgcggctcaggccggggtgaaaatcgacgccgtgactcatcggcacatggcccatatgctccacgccgccaaccagacatgcctgcgcatcgccagtcatgatcattcgtgctgcgtcatgcagtgcctgcatggaactaccacacaagcgattaacggtaaccgccgggacagagtgtggtacttctgccagcagcgccgcgttacgggcgatattaaaaccctgctccagcgtctgctgcacacaaccccagtaaatatcgtcgagggccgccgcttccagcgccgggttacgcgccagcaggctacgcattaaatgagcggagagatcttctgcacgcacgttacgaaaagcaccgcccttgctacggcccatcggggtgcgaattgcatcgacaatgacaacctgttccattgtgactccttaagccgttttcaggtcgccaaccggacgggctggctcaaccggaggatagtacggttcgttatgacgcgctttattacgcagaccttccggcacttcatacagcgggccgaggtgctgatattgctgtgccatatcgaggtattttgcgctaccgagggtgtccagccagcggaacgcgccgccgtggaacggagggaagcccaggccgtagaccagcgccatatccgcttccgccggagtggcgataatgccttcctccagacagcgcaccacttcgttgaccatcgggatcatcatgcgggcgataatctcttcttcgctgaagtcgcgcttcggctggctcacttctgccagcaggtcttcaacggcggcgtcttcttctttcttcggcttacctttgctgtcttctttataacgccagaaaccgaggccgttcttctgaccaaagcggttggcatcaaacagcgcgtcgatggcatcgcggtaatctttctgcatccgctgcgggaagcctgctgccatgacagcctgagcgtgatgcgcggtatcaatgcccacaacgtccagcagatatgccgggcccatcggccagccaaactgtttttccatcactttgtcgatcttgcggaaatccgcgccgtcgcgcagcagctggctgaaaccggcgaaatacgggaacagcacgcggttaacaaagaagccggggcagtcgttaaccacaatcggcgtcttgcccatcttgctcgcccaggcgacaactttcgcgatggtttcgtcggagcttttctcgccgcgaataatttctaccaacggcattcggtggaccgggttaaagaagtgcatcccgcagaagttttccgggcgttccagcgcgttggccagttcgctgataggaatggtactagtgttagacgccagcacggtatcctggcgtactttttgttcggtttctgccagtacggcttttttcactttcgggttttcaacaaccgcttctaccacaatatccacgcggtcaaatccggcgtagtcgagcgttgggtggattgtggagatcacgccagccagtttcagaccatcgatcttgccgcgctcaagctgcttgttcagcagtttcgcggcttcggtcatgccgagggttaagctcttgtcgttgatatctttcatgacaaccggcacgcctttccacgcagactggtaagcgatgccgccgcccataatgcctgcacccagcaccgcggcctgtttcggggtttcaacgtctttggtgagtttcttcgctttgccttttacatattgatcgttaaggaaaatgccgaccagtgcgcgggcttcgttggtatgcgccagcgggacaaaacttttgttttccaggtttaaggcttcttcacgaccaaaacgggccgcagcttcaatggtttttactgcggtgatgggggccggataatgtttccccgctgtttgtgcgaccatccctttagcgatggtgaagctcatggtggcttcaatcttgctcagttttagtggttccagcttcggctgacgttttgctttccagtcgaggtcgccgttaatggcctggcgtaaaaccgcctttgcgccttcaaccagtttttctgctttgactacgccatccaccagaccgattttcagcgcctgatccgcgccgacatctttaccggcggcaatgatttccagcgcactgtcagcgcccagcatacgtggcatacgtacagaaccgccaaagccaggcatgatgcccagtttggtttccggcagaccgatgcgcagatccggcgtcgccagacgataatcggtcgccagcacgcattcgcagccaccgcccagcgcatagccattgacggcagcaatggtcggcaccggcagatcttccaggcgattaaacacgctattggcaaagtgcagccactgacttaactgttcttcaggaacgaggaacagggacaaaaattcggtgatatcagcaccgacgataaaggctgctttgttgctacgcagcagcagcccttttagatcactttgctgttccagcacgccgatggcctcgccgaggctggcgacggtcgcagtgtcgagtttattaacactacctggggcatcaaataccagttcggcaatgccatcttccagccagtcaaggtacagggtgtcgcctttgtaaagcatgtcagtctcctgaatccgcaaggtgatctggtcgtaccagatgagtcgaagtgtgtattttgtgttaaaaatatgcaaacaaaagattaaagaaatgccgatctgatcacgctcggcagaaatcacgctctggatgaacgatgtgctaagatgcggagacttaaggtcaaaaaaacagaagggtaaaaaatggaaagtctggccagcctctataaaaatcatatagctaccttacaagaacggactcgcgatgcgctggcgcgcttcaagctggatgcgttacttattcactccggcgagctgttcaatgtttttctcgacgatcatccctatccgtttaaagtgaacccgcaattcaaagcgtgggtgccggtaactcaggtgccaaactgctggttgctggtggatggcgtgaacaagccgaaactgtggttctatctgccggttgattactggcacaacgtcgaaccgctgccgacctctttctggactgaagatgtggaagtgatcgcgctgccgaaagccgatggcattggtagcctgctgcctgctgcgcgcggcaatatcggttatatcggtccggtgccggaacgtgcgctgcaactgggtattgaggccagcaacatcaacccgaaaggggttatcgactacctgcattactatcgctccttcaaaactgagtacgaactggcctgtatgcgtgaagcgcagaaaatggcggtcaacggtcaccgcgcggcagaagaagcgttccgttctggcatgagcgagttcgatatcaacattgcctatctgaccgcgaccggtcatcgtgataccgacgtaccttacagcaacattgtggcgcttaacgaacacgctgcggtactgcattacaccaaactggaccatcaggcaccggaagagatgcgcagcttcctgctggatgccggggcagaatataacggctatgcggctgacctgacccgtacctggagcgcaaaaagtgacaacgactacgcgcagctggtgaaggacgttaatgatgaacaactggcgctgatcgccaccatgaaagcaggcgtcagctatgtggattaccacatccagttccatcagcgcatcgccaaactgctgcgtaaacatcaaatcatcaccgatatgagtgaagaagcgatggtcgaaaacgatcttaccgggccgtttatgccgcatggtatcggccatccgctgggcctgcaggtgcatgacgtcgctggttttatgcaggatgatagcggtacgcacctcgcggcaccggcaaaatatccgtacctgcgctgcacccgtattctccagccgggcatggtgttaaccatcgaaccgggtatctacttcatcgaaagcctactggcaccgtggcgtgaagggcagttcagcaagcacttcaactggcagaaaattgaagcactgaaaccgttcggcggcattcgtatcgaagacaacgtggtgatccacgaaaacaacgtggaaaacatgacccgggatctgaaactggcgtgatggaaagctggttaattcctgcggcaccggtcacggtcgttgaagagatcaaaaagagccgcttcataacgatgttggcgcataccgatggcgttgaggcggcgaaagcgtttgttgaaagcgtgcgggcagaacaccccgatgcccggcaccattgcgtggcgtgggtcgcgggtgcgccggatgattctcaacagctgggtttctctgacgacggggagccggcgggaacggcaggtaaaccgatgctcgcccagctaatgggcagcggcgtcggggaaattaccgctgtggtagtgcgctactacggcggcatattgcttggcaccggtgggttagtgaaagcgtatggcggcggcgtgaatcaggcgctgcgccagctaacgacccaacgcaagacgccattaaccgaatatactttgcaatgtgaatatcatcagttaaccggcattgaagcgttgctggggcagtgtgacggcaaaattatcaacagtgattatcaggcattcgttctgctgcgggtggcgcttccggcggcgaaagtggctgaattttccgcaaagctggcggattttagccgtggtagtttgcaattgttagcgattgaagaataatccccacttcgttttgcagaactaaggaagcggcagagatgcattttcgcgccattacccgaatcgttggactactggtcatcttatttagtgggaccatgattatccctgggctggtagcactcatctaccgggatggagcgggccgcgcttttacccagaccttttttgtcgccctcgccattggctctatgctgtggtggccgaaccgcaaagagaaaggcgaacttaaatcccgtgaggggtttctgatagtggtgctgttctggaccgtgctgggtagcgtcggtgcgctcccttttatcttcagcgaaagcccgaacctcacgattaccgatgcgttttttgaatctttctctggcctgaccactacgggagccactacgctggtggggctggatagcctccctcacgccatcctcttttatcgccagatgctgcaatggtttggcgggatggggatcatcgtgttggcggttgcgatactgcctatcctcggcgtgggtgggatgcagctctatcgcgcagaaatgcccggcccgctgaaagataacaaaatgcgcccgcgaattgcggaaacggcgaaaaccctgtggttgatttatgtcttgctgaccgtcgcctgtgcgctggcgttgtggtttgccggaatggatgcctttgatgccatcggccatagctttgcgactatcgctattggcggcttcagcacacatgatgccagtatcggttatttcgatagcccgactattaacactatcattgctatcttcctgctgatctccggctgtaactacggtctgcactttagtctgttaagtgggcgtagtctgaaggtttattggcgcgatccggaatttcgcatgtttatcggcgtacagtttacgctggtggttatttgtaccctcgtactgtggtttcataatgtctacagtagcgcgctgatgacaattaaccaggcgtttttccaggtggtgagcatggcgacaaccgccgggtttacaactgacagcattgcccgctggccgctctttttgccggtactgcttttatgtagtgcctttatcggcggttgcgccgggagtacgggcggtggcctgaaggtgatccgcatcctgctgctgtttaagcaggggaaccgtgagctgaaacgactggtgcatccgaacgccgtctatagcattaagctggggaatcgcgcactgccggaacgtatcctcgaagccgtttggggatttttctccgcctatgcattggtgtttattgtcagtatgctggcgattatcgccacgggcgtggatgacttttctgcctttgcgagcgttgttgcgacattgaataacctggggccagggcttggcgtggttgctgataactttaccagtatgaacccggtggctaaatggatcctgattgccaacatgctgtttggtcgtctcgaggtctttacattgctggtgctctttaccccgactttctggcgtgaatgatggagtaatacgtgaaaacattaattcttttcagtacaagggacggacaaacgcgcgagattgcctcctacctggctagcgaactgaaagaactggggatccaggcggatgtcgccaatgtgcaccgcattgaagaaccacagtgggaaaactatgaccgtgtggtcattggtgcttctattcgctatggtcactaccatagtgcgttccaggaatttgtcaaaaaacatgcgacgcggctgaatagcatgccgagcgccttttactccgtgaatctggtggcgcgcaaaccggagaagcgtactccacagaccaacagctacgcgcgcaagtttctgatgaacagccaatggcgtcccgatcgctgcgcggtcattgccggggcgctgcgttacccacgttatcgctggtacgaccgttttatgatcaagctgattatgaagatgagtggcggtgaaacggatacgcgcaaagaagttgtctataccgattgggagcaggtggcgaatttcgcccgagaaatcgcccatttaaccgacaaaccgacgctgaaataagcataaagaataaaaaatgcgcggtcagaaaattattttaaatttcctcttgtcaggccggaataactccctataatgcgccaccactgacacggaacaacggcaaacacgccgccgggtcagcggggttctcctgagaactccggcagagaaagcaaaaataaatgcttgactctgtagcgggaaggcgtattatgcacaccccgcgccgctgagaaaaagcgaagcggcactgctctttaacaatttatcagacaatctgtgtgggcactcgaagatacggattcttaacgtcgcaagacgaaaaatgaataccaagtctcaagagtgaacacgtaattcattacgaagtttaattctttgagcgtcaaacttttaaattgaagagtttgatcatggctcagattgaacgctggcggcaggcctaacacatgcaagtcgaacggtaacaggaagaagcttgcttctttgctgacgagtggcggacgggtgagtaatgtctgggaaactgcctgatggagggggataactactggaaacggtagctaataccgcataacgtcgcaagaccaaagaggggtaccttcgggcctcttgccatcggatgtgcccagatgggattagctagtaggtggggtaacggctcacctaggcgacgatccctagctggtctgagaggatgaccagccacactggaactgagacacggtccagactcctacgggaggcagcagtggggaatattgcacaatgggcgcaagcctgatgcagccatgccgcgtgtatgaagaaggccttcgggttgtaaagtactttcagcggggaggaagggagtaaagttaatacctttgctcattgacgttacccgcagaagaagcaccggctaactccgtgccagcagccgcggtaatacggagggtgcaagcgttaatcggaattactgggcgtaaagcgcacgcaggcggtttgttaagtcagatgtgaaatccccgggctcaacctgggaactgcatctgatactggcaagcttgagtctcgtagaggggggtagaattccaggtgtagcggtgaaatgcgtagagatctggaggaataccggtggcgaaggcggccccctggacgaagactgacgctcaggtgcgaaagcgtggggagcaaacaggattagataccctggtagtccacgccgtaaacgatgtcgacttggaggttgtgcccttgaggcgtggcttccggagctaacgcgttaagtcgaccgcctggggagtacggccgcaaggttaaaactcaaatgaattgacgggggcccgcacaagcggtggagcatgtggtttaattcgatgcaacgcgaagaaccttacctggtcttgacatccacggaagttttcagagatgagaatgtgccttcgggaaccgtgagacaggtgctgcatggctgtcgtcagctcgtgttgtgaaatgttgggttaagtcccgcaacgagcgcaacccttatcctttgttgccagcggtccggccgggaactcaaaggagactgccagtgataaactggaggaaggtggggatgacgtcaagtcatcatggcccttacgaccagggctacacacgtgctacaatggcgcatacaaagagaagcgacctcgcgagagcaagcggacctcataaagtgcgtcgtagtccggattggagtctgcaactcgactccatgaagtcggaatcgctagtaatcgtggatcagaatgccacggtgaatacgttcccgggccttgtacacaccgcccgtcacaccatgggagtgggttgcaaaagaagtaggtagcttaaccttcgggagggcgcttaccactttgtgattcatgactggggtgaagtcgtaacaaggtaaccgtaggggaacctgcggttggatcacctccttaccttaaagaagcgttctttgaagtgctcacacagattgtctgatgaaaatgagcagtaaaacctctacaggcttgtagctcaggtggttagagcgcacccctgataagggtgaggtcggtggttcaagtccactcaggcctaccaaatttgcacggcaaatttgaagaggttttaactacatgttatggggctatagctcagctgggagagcgcctgctttgcacgcaggaggtctgcggttcgatcccgcatagctccaccatctctgtagtgattaaataaaaaatacttcagagtgtacctgcaaaggttcactgcgaagttttgctctttaaaaatctggatcaagctgaaaattgaaacactgaacaacgaaagttgttcgtgagtctctcaaattttcgcaacacgatgatgaatcgaaagaaacatcttcgggttgtgaggttaagcgactaagcgtacacggtggatgccctggcagtcagaggcgatgaaggacgtgctaatctgcgataagcgtcggtaaggtgatatgaaccgttataaccggcgatttccgaatggggaaacccagtgtgtttcgacacactatcattaactgaatccataggttaatgaggcgaaccgggggaactgaaacatctaagtaccccgaggaaaagaaatcaaccgagattcccccagtagcggcgagcgaacggggagcagcccagagcctgaatcagtgtgtgtgttagtggaagcgtctggaaaggcgtgcgatacagggtgacagccccgtacacaaaaatgcacatgctgtgagctcgatgagtagggcgggacacgtggtatcctgtctgaatatggggggaccatcctccaaggctaaatactcctgactgaccgatagtgaaccagtaccgtgagggaaaggcgaaaagaaccccggcgaggggagtgaaaaagaacctgaaaccgtgtacgtacaagcagtgggagcacgcttaggcgtgtgactgcgtaccttttgtataatgggtcagcgacttatattctgtagcaaggttaaccgaataggggagccgaagggaaaccgagtcttaactgggcgttaagttgcagggtatagacccgaaacccggtgatctagccatgggcaggttgaaggttgggtaacactaactggaggaccgaaccgactaatgttgaaaaattagcggatgacttgtggctgggggtgaaaggccaatcaaaccgggagatagctggttctccccgaaagctatttaggtagcgcctcgtgaattcatctccgggggtagagcactgtttcggcaagggggtcatcccgacttaccaacccgatgcaaactgcgaataccggagaatgttatcacgggagacacacggcgggtgctaacgtccgtcgtgaagagggaaacaacccagaccgccagctaaggtcccaaagtcatggttaagtgggaaacgatgtgggaaggcccagacagccaggatgttggcttagaagcagccatcatttaaagaaagcgtaatagctcactggtcgagtcggcctgcgcggaagatgtaacggggctaaaccatgcaccgaagctgcggcagcgacactatgtgttgttgggtaggggagcgttctgtaagcctgtgaaggtgtgctgtgaggcatgctggaggtatcagaagtgcgaatgctgacataagtaacgataaagcgggtgaaaagcccgctcgccggaagaccaagggttcctgtccaacgttaatcggggcagggtgagtcgacccctaaggcgaggccgaaaggcgtagtcgatgggaaacaggttaatattcctgtacttggtgttactgcgaaggggggacggagaaggctatgttggccgggcgacggttgtcccggtttaagcgtgtaggctggttttccaggcaaatccggaaaatcaaggctgaggcgtgatgacgaggcactacggtgctgaagcaacaaatgccctgcttccaggaaaagcctctaagcatcaggtaacatcaaatcgtaccccaaaccgacacaggtggtcaggtagagaataccaaggcgcttgagagaactcgggtgaaggaactaggcaaaatggtgccgtaacttcgggagaaggcacgctgatatgtaggtgaagcgacttgctcgtggagctgaaatcagtcgaagataccagctggctgcaactgtttattaaaaacacagcactgtgcaaacacgaaagtggacgtatacggtgtgacgcctgcccggtgccggaaggttaattgatggggttagccgcaaggcgaagctcttgatcgaagccccggtaaacggcggccgtaactataacggtcctaaggtagcgaaattccttgtcgggtaagttccgacctgcacgaatggcgtaatgatggccaggctgtctccacccgagactcagtgaaattgaactcgctgtgaagatgcagtgtacccgcggcaagacggaaagaccccgtgaacctttactatagcttgacactgaacattgagccttgatgtgtaggataggtgggaggctttgaagtgtggacgccagtctgcatggagccgaccttgaaataccaccctttaatgtttgatgttctaacgttgacccgtaatccgggttgcggacagtgtctggtgggtagtttgactggggcggtctcctcctaaagagtaacggaggagcacgaaggttggctaatcctggtcggacatcaggaggttagtgcaatggcataagccagcttgactgcgagcgtgacggcgcgagcaggtgcgaaagcaggtcatagtgatccggtggttctgaatggaagggccatcgctcaacggataaaaggtactccggggataacaggctgataccgcccaagagttcatatcgacggcggtgtttggcacctcgatgtcggctcatcacatcctggggctgaagtaggtcccaagggtatggctgttcgccatttaaagtggtacgcgagctgggtttagaacgtcgtgagacagttcggtccctatctgccgtgggcgctggagaactgaggggggctgctcctagtacgagaggaccggagtggacgcatcactggtgttcgggttgtcatgccaatggcactgcccggtagctaaatgcggaagagataagtgctgaaagcatctaagcacgaaacttgccccgagatgagttctccctgactccttgagagtcctgaaggaacgttgaagacgacgacgttgataggccgggtgtgtaagcgcagcgatgcgttgagctaaccggtactaatgaaccgtgaggcttaaccttacaacgccgaaggtgttttggcggattgagagaagattttcagcctgatacagattaaatcagaacgcagaagcggtctgataaaacagaatttgcctggcggcagtagcgcggtggtcccacctgaccccatgccgaactcagaagtgaaacgccgtagcgccgatggtagtgtggggtctccccatgcgagagtagggaactgccaggcatcaaataaaacgaaaggctcagtcggaagactgggcctttcgttttatctgttgtttgtcggtgaacgctctcctgagtaggacaaatccgccgggagcggatttgaacgttgcgaagcaacggcccggagggtggcgggcaggacgcccgccataaactgccaggcatcaaattaagcagaaggccatcctgacggatggcctttttgcattggcgcagaaaaaaatgccggatgcgacgctggcgcgtcttatccagcctactcttgcttatccgttctgcttttgcatccactccaccacaaaatcagccagcccctcaacatcattaatatccagtaatgcgacatcaagattaagcggcacatcactggctacagcaataacatgcctgtctatcactaattcttcaggtcgatgtccggctccatcgcgaaacagcacaatctttgcgatctcttcatgcttaaacccttcgaccagaatcaaatccagcttactggtatccattcgacttgcgagaaactgtagatccagctcttcttcgtctggtgtttccgtcatcaaggcccatcgttgctggctggcaacgatggtttgtaccgcgccagccttgcgcagctcatagctatctttgcctggcttatcaacatccatatcatggtgcgtatgcttaatcagccctggacggatccctctggcgcataatgccgggatcagttttttcaaaagcgtagtttttccggtaccactccacgcggcaaaggcgagtaacggtatcatcgtttttcctgccatcgggcaagctcctctggcgtattcacgttaacaaatgcatctttatgatcgctgaaatcaaccgcatgaccgccagccagacgcataaataccattacccggcgttctcctgcttgcagatattccagtaataaaggctcaatagcgcggtttaccagagcaatagtcgggtgatcgcgttcaccgtcatggacccacacgacaggcgcatctttgcgctgatgattaagcctggctgctaaatcagggggaatgtaaggcgtatcgcacgggcaaaacaaaaaccactcaccagcttcctgctgcattacactaagcattcctgccagagggcctgggtaatccgccagactatcttcaatcactttcagaccgcttgcctgatagatttcctgatgacgattagcattaaccacgacgtgagagagctgcgtcataagcgcgtcagcgacatgttgccataatggtttgccgtttaattcaagcaatcctttatctacgccgcccattcgtctggctttaccgcctgccagcacaacgcctgttatcgtcgtcatcagattcaccgatatcgcctcttttattgtgggattgaccctgctaacgtgtctgtctcaagagtaaggagcatcactatgaaatgtaaacgtctgaatgaagttattgaactcctccagccagcctggcaaaaagagccagaccttaacctgctgcaatttttgcagaaactggcgaaagagagtggttttgacggcgaactggcggatttgacggatgacattctgatctatcacctgaaaatgcgtgattccgcgaaagatgcggtgatcccgggtttgcagaaagattatgaagaagacttcaaaacggcgctgttacgcgctcgcggcgtaattaaagagtaaaagcttgtaagcggcgccaccaaaatcatcgtgaaatgatatccttcgtcattcgtaatgttttccggatgatgggatgaataacagcgcttttactttccagacactacacccggataccatcatggacgctctgtttgagcatgggatccgggtggattccggtcttaccccgcttaacagctatgaaaaccgtgtctatcaatttcaggacgaagatcgtcgacgttttgtcgtcaaattttatcgccctgaacgttggacagccgatcaaatcctcgaagaacatcaatttgcgttgcagctggtaaatgatgaagttccggtcgcagcacctgtggcctttaacggtcagactttattgaatcatcagggattttatttcgctgtttttccaagcgtcggtggtcgccagttcgaagctgataatatcgatcagatggaagcggttgggcgttatttagggcgtatgcaccagacggggcgcaaacagctttttatccatcgcccgaccatcggtttgaacgaatatctcattgagccacgcaagctgtttgaggacgctacactgataccttccgggttgaaagcggcattcctgaaagcgacagatgagctgattgccgccgttacagcacactggcgggaagatttcaccgttctgcggctacatggagactgccacgccgggaatattctctggcgcgatggtccaatgtttgttgatctggatgatgcacgtaatggtccagccgttcaggatttgtggatgttgctcaatggcgataaagccgagcagcggatgcaactggaaactattattgaagcttatgaagaatttagcgagttcgacaccgctgaaatcggactgattgaacctttacgcgccatgcgtttggtttattatcttgcctggctaatgcggcgttgggctgatcccgcgttcccgaaaaatttcccgtggttaaccggggaagattactggctgcgacagacggcgacttttatagaacaggcaaaagttctacaagaaccccctttgcaattaacacctatgtattaatcggagagagtagatcatgaaaaagatttggctggcgctggctggtttagttttagcgtttagcgcaagcgcggcgcagtatgaagatggtaaacagtacactaccctggaaaaaccggtagctggcgcgccgcaagtgctggagtttttctctttcttctgcccgcactgctatcagtttgaagaagttctgcatatttctgataatgtgaagaaaaaactgccggaaggcgtgaagatgactaaataccacgtcaacttcatgggtggtgacctgggcaaagatctgactcaggcatgggctgtggcgatggcgctgggcgtggaagacaaagtgactgttccgctgtttgaaggcgtacagaaaacccagaccattcgttctgcttctgatatccgcgatgtatttatcaacgcaggtattaaaggtgaagagtacgacgcggcgtggaacagcttcgtggtgaaatctctggtcgctcagcaggaaaaagctgcagctgacgtgcaattgcgtggcgttccggcgatgtttgttaacggtaaatatcagctgaatccgcagggtatggataccagcaatatggatgtttttgttcagcagtatgctgatacagtgaaatatctgtccgagaaaaaataattcaatgtaaattacataaagcccgtgaatattcacgggctttttttattatttaataaatataaatacattctgataatgcatcctgccgctggacattatttcagcataagtggatattcaaagttttgctgttttatcagggaatatttatatgatacgtaagagtgctacaggtgttattgttgcgttagccgtaatctggggtggtggcacatggtacacaggtacgcaaattcagcctggtgtcgaaaaatttattaaagattttaacgatgctaaaaagaaaggtgaacatgcctacgatatgacgttaagttatcaaaattttgacaaaggcttttttaattcccgttttcaaatgcaaatgacattcgataacggtgcacccgatctcaatatcaagccaggccagaaagttgtatttgatgtggatgttgagcacggtccgttgcccatcacaatgttaatgcatggtaatgtcatcccagcactggcagcggcaaaagtgaacttagtgaataatgaactgacacaaccgctatttatcgccgcgaaaaataaaagccccgtggaagcgacattgcgattcgcgtttggtggcagtttctctacgacattagatgttgcccctgcagagtatggaaagttttcttttggtgagggccagtttacttttaatggtgatggtagtagtttgtctaacctggatattgaaggcaaagtcgaagatattgttctgcaattaagtccaatgaacaaagtaacggcaaaaagttttaccattgattctctggcgcgattagaagaaaagaaatttccggttggtgaaagcgagagcaaatttaatcagattaacattatcaatcacggggaagacgttgcccaaatcgatgctttcgttgcaaaaaccaggctggatcgcgttaaagacaaagattatatcaatgtcaatctcacctacgaacttgataagttaacaaaagggaatcagcaactcggtagtggtgagtggagtttgattgctgaatctattgatcccagtgcagtgcgccaatttatcatccagtataacattgcgatgcagaagcagcttgctgcacaccctgagttagcaaacgatgaagttgctctgcaagaagtgaatgctgcattgttcaaagagtatttaccgttattacaaaaaagtgagccgaccattaaacaaccggtaagatggaagaacgcactcggcgaactaaatgccaatctggatatcagtattgccgacccagccaaatctagtagttccacaaacaaagatatcaaaagcctcaattttgatgtgaagttaccgcttaatgtcgtcacagaaaccgcaaaacagcttaatttatctgaaggaatggatgcggaaaaagcgcaaaagcaggctgataaacaaatcagcgggatgatgacattaggtcagatgtttcagttaatcacgattgacaacaataccgccagcctgcagctgcgttatacaccgggtaaagttgtttttaacggacaggagatgagcgaagaagaatttatgtctcgtgccggacgttttgttcattaaaatactcactcgcctctgctcattcagaggcgagtaaaacttacttattctgacgctgactactcatgagagacgtcagaagccggtctttttcctgccacaaactgttcagccattgctgaaaatggcgcttaaagcttttgtcattgatgtagtcgccatgtaactcatcggcaataggctgtaaatccacatgtacgacaatccgcgtcagtttaccgcttaacatatcgaagaacggctgacggttattgtccggataacacagcgtaacattaagcagtttatcgaattgtttacccagtacatttagcgccatcgcaatgcctgccgcctttggtggcaacaagttttgaaaagtggagtgggtttgctgatgtttttcttgcgtgaaacgggagccttcaacgaaattgacaatggtggtgggatgcaggcgaaacttttcacaagaacgccgagtggtttcaacatctttaccacgtcgctccggatgacgtaataaataagcgcgggaataacgcttcataaacggcatatccaggctccagcacgccaggccaagaaatggcacccaggccagctgttgcttgaggaaatatttattcatcggaatgtgcttacgaaacagcacgcacagtacgacaacatctgcccaactacggtggttacaaataagcagataccagttcttcttacttaacccttccagcccgtgaacttcccattgaaggtgtgggttcagatgcagtaataccgccagaccttcacaccagcaatacatcataaaatcacaaaaacggctaacctttcgccaaatgactggcacaggtagcaatagttttacaatcccggcaatgatgatcgggacggaacaaaaaatagtgaccaaaatggtcaatacgatactcagcaaaagggttatcgcagcgagtattctcgtcataatgaatttattcaaaaggttagccatagacagtgcgctaaagaagcgcaaggcgcagattttagcagaaaacgacccaaataacggatgatccttaaggagaaaaataattcatatctatccacattagaaaaaatcccattatctcaattattagggatggatttatttttaactgcatgaaaaacaaagacaaacatcatgctgtaaaaagcatgataataaattaaaagcgatgtaaataatttatgcacaaagttatccacatgacgatttgcgagcgatccagaagatctacaaaagattttcacgaaaagcggtgaaaaactcatgttttcatcctgtctgtggcatcctttacccataatctgataaacaggcacggacattatggttcagatcccccaaaatccacttatccttgtagatggtagttcttatctttatcgcgcatatcacgcgtttcccccgctgactaacagcgcaggcgagccgaccggtgcgatgtatggtgtcctcaacatgctgcgcagtctgatcatgcaatataaaccgacgcatgcagcggtggtctttgacgccaagggaaaaacctttcgtgatgaactgtttgaacattacaaaagtcatcgcccgccaatgccggacgatctgcgtgcacaaatcgaacccttgcacgcgatggttaaagcgatgggactgccgctgctggcggtttctggcgtagaagcggacgacgttatcggtactctggcgcgcgaagccgaaaaagccgggcgtccggtgctgatcagcactggcgataaagatatggcgcagctggtgacgccaaatattacgcttatcaataccatgacgaataccatcctcggaccggaagaggtggtgaataagtacggcgtgccgccagaactgatcatcgatttcctggcgctgatgggtgactcctctgataacattcctggcgtaccgggcgtcggtgaaaaaaccgcgcaggcattgctgcaaggtcttggcggactggatacgctgtatgccgagccagaaaaaattgctgggttgagcttccgtggcgcgaaaacaatggcagcgaagctcgagcaaaacaaagaagttgcttatctcagttaccagctggcgacgattaaaaccgacgttgaactggagctgacctgtgaacaactggaagtgcagcaaccggcagcggaagagttgttggggctgttcaaaaagtatgagttcaaacgctggactgctgatgtcgaagcgggcaaatggttacaggccaaaggggcaaaaccagccgcgaagccacaggaaaccagtgttgcagacgaagcaccagaagtgacggcaacggtgatttcttatgacaactacgtcaccatccttgatgaagaaacactgaaagcgtggattgcgaagctggaaaaagcgccggtatttgcatttgataccgaaaccgacagccttgataacatctctgctaacctggtcgggctttcttttgctatcgagccaggcgtagcggcatatattccggttgctcatgattatcttgatgcgcccgatcaaatctctcgcgagcgtgcactcgagttgctaaaaccgctgctggaagatgaaaaggcgctgaaggtcgggcaaaacctgaaatacgatcgcggtattctggcgaactacggcattgaactgcgtgggattgcgtttgataccatgctggagtcctacattctcaatagcgttgccgggcgtcacgatatggacagcctcgcggaacgttggttgaagcacaaaaccatcacttttgaagagattgctggtaaaggcaaaaatcaactgacctttaaccagattgccctcgaagaagccggacgttacgccgccgaagatgcagatgtcaccttgcagttgcatctgaaaatgtggccggatctgcaaaaacacaaagggccgttgaacgtcttcgagaatatcgaaatgccgctggtgccggtgcttagtcgcattgaacgtaacggtgtgaagatcgatccgaaagtgctgcacaatcattctgaagagctcacccttcgtctggctgagctggaaaagaaagcgcatgaaattgcaggtgaggaatttaacctttcttccaccaagcagttacaaaccattctctttgaaaaacagggcattaaaccgctgaagaaaacgccgggtggcgcgccgagtacgagcgaagaggtactggaagaactggcgctggactatccgttgccaaaagtgattctggagtatcgtggtctggcgaagctgaaaagcacctacaccgacaagctgccgctgatgatcaacccgaaaaccgggcgtgtgcatacctcttatcaccaggcagtaactgcaacgggacgtttaagcagtaccgatcctaacctgcaaaacattccggtgcgtaacgaagaaggtcgtcgtatccgccaggcgtttattgcgccagaggattatgtgattgtcagtgcggactacagccagattgaactgcgcattatggcgcatcttagccgtgacaaaggcttgctgaccgcattcgcggaaggaaaagatatccaccgggcaacggcggcagaagtgtttggtttgccactggaaaccgtcaccagcgagcaacgccgtagcgcgaaagcgatcaactttggtctgatttatggcatgagtgctttcggtctggcgcggcaattgaacattccacgtaaagaagcgcagaagtacatggacctttacttcgaacgctaccctggcgtgctggagtatatggaacgcacccgtgctcaggcgaaagagcagggctacgttgaaacgctggacggacgccgtctgtatctgccggatatcaaatccagcaatggtgctcgtcgtgcagcggctgaacgtgcagccattaacgcgccaatgcagggaaccgccgccgacattatcaaacgggcgatgattgccgttgatgcgtggttacaggctgagcaaccgcgtgtacgtatgatcatgcaggtacacgatgaactggtatttgaagttcataaagatgatgttgatgccgtcgcgaagcagattcatcaactgatggaaaactgtacccgtctggatgtgccgttgctggtggaagtggggagtggcgaaaactgggatcaggcgcactaagattcgcctgaacatgccttttttcgtaagtaagcaacataagctgtcacgttttgtgatggctattagaaattcctatgcaacaactgaaaaaaaattacaaaaagtgctttctgaactgaacaaaaaagagtaaagttagtcgcgtagggtacagaggtaagatgttctatctttcagaccttttacttcacgtaatcggatttggctgaatattttagccgccccagtcagtaatgactggggcgttttttattgggcgaaagaaaagatccgtaatgcctgatgcgctatgtttatcaggccaacggtagaattgtaatctattgaatttacgggccggatacgccacatccggcacaagcattaaggcaagaaaattattcgccgtcctgcgtttcttctacaggctgcatctcgctaaaccaggtatccagtttctgccgcagcttgtccacgccttgtttcttcaagctagaaaacgtttcaacctgcacatcaccgttaaacgccagtacagcttcacgcaccatattcaattgcgctttacgtgcgccgcttgccagtttgtccgctttggtcagcagcaccagaacggcgatattgctgtctaccgcccactcaatcatctgctgatccaaatctttcagcggatggcgaatatccattagcaccaccagaccttgcaggctctgacgtttttcgaggtattcgccgagcgcacgctgccatttgcgcttcatctcttccgggacttccgcataaccgtacccaggcaagtcaaccagacgcttgccgtcagccacttcaaacaggttgataagctgggtgcgccctggggttttactggtacgagccaggcttttctggttagtcagcgtgttcagcgcgctggatttacctgcgttggaacggcctgcaaaagccacttcaattccggtatcggaaggtaggtggcgaatatcaggcgcactcatcacaaaatgcgtctgttgataattcaaattagtcaaagcggtcgtctccgtcagtcaaagctttgtggcgattatacctgaaccataataaaaggcggatttttcggcgtgagcgttgtaagtaaaagccatacgctttgtgagacattgccgatagtctttatgcgaaatagcagagaaaattctgcgatgcatgtcaaataagctatataaatcagtgaattgcttttatataaaactctgaaaatgtgcaaatactgatggcggttgattgtttgtttaaagcaaaggcgtaaagtagcacccatagagcgaggacgctaacaggaacaatgactcaggatgagggtcaggagcgccaggaggcgaagacagaggattgtcaggaagacaaacgtccggagacgtaattaaacggaaatggaatcaacacggattgttccggctaaaggaaaaacagggtgtgttggcggcctgcaaggattgtaagacccgttaagggttatgagtcaggaaaaaaggcgacagagtaatctgtcgccttttttctttgcttgctttctgttagattccgccgcaaatctatactgaataaaacggctaaaagacgaaccattatgaaaccaagttctagtaacagtcgcagcaaaggtcatgcaaaagcgcgtcgaaaaacacgcgaggagctggatcaggaagctcgtgatcgcaagcgtcagaaaaaacgtcgtggtcatgcgccgggcagccgcgcagcgggcggaaacaccacgagtggcagcaaaggccagaacgcaccaaaagatccacgtattggcagtaaaacccctattccattgggcgtgactgaaaaagtcaccaaacagcacaaaccgaagagtgagaaacctatgcttagtccgcaggcggagttggaattactggaaacggatgagcgtctggatgcgctgctggaacgtctggaagcaggcgaaaccctgagtgccgaagagcaatcctgggtggatgctaaactggatcgtattgatgagttgatgcagaaactcggcctctcttatgacgatgacgaagaagaggaagaagacgagaagcaagaagacatgatgcgtctgctgcggggcaactaacggattgccgccgtgggccttcccgttctgctgataacccttccggttatatgttatctggtgtggttattcgttaaactacagcggttgtcgcggcgacaaaagtggctgcgcaaccggctgatgacccgaaacgggcatccgccggtacgccgtagccgccagagacgccatcggaaggagtgagcatgtctgtacagcaaatcgactgggatctggccctgatccagaaatataactattccgggccacgatacaccagctacccgaccgcgctggagtttagtgaagacttcggcgaacaggcgtttttacaagccgtggcgcgctatcctgagcgtccattatctctctacgtacatatcccgttctgccataagctttgttacttctgcggttgcaataagattgttactcgccagcagcacaaggccgatcagtatctggacgcgctggagcaagaaatcgtccatcgtgcaccgctgttcgccgggcgtcacgtcagccaattgcactggggcggcggaacgccgacgtatctgaataaagcgcaaatcagccgcctgatgaagctgctgcgcgaaaacttccagttcaatgccgatgcggagattagcatcgaagtcgatccgcgggaaatcgaactggatgtactcgatcatttacgcgccgaaggctttaatcgcctgagcatgggcgtgcaggacttcaacaaagaagtgcaacgtctggttaaccgcgagcaggatgaagagttcatctttgcactgcttaaccatgcgcgtgagattggttttacctccaccaacatcgacctgatttacggcctgccgaaacagacgccggagagtttcgcctttaccctgaaacgtgtggcggagctgaaccccgatcgtctgagtgtctttaactacgcgcatctgccgaccatttttgctgctcagcgcaaaatcaaagatgctgacctgccgagtccgcagcaaaaactcgatatcctgcaggaaaccatcgccttcctgacgcaaagcggctatcagtttatcggtatggatcactttgcccgtccggatgacgagctggcggtggcccagcgtgaaggcgtgctgcatcgtaacttccagggctacaccactcagggcgataccgatctgctggggatgggcgtttccgccatcagcatgattggcgactgctacgcgcagaaccagaaagagttgaagcagtactatcagcaagtggatgaacaaggcaatgcgctgtggcgtggtattgcgctaacgcgtgatgactgtattcgccgcgatgtgattaagagcctcatctgcaacttccgtctggattacgcccctattgagaaacagtgggatttgcacttcgctgattactttgcggaagatctcaagctgctcgccccgttagcaaaagatgggctggtggatgtggatgagaagggaatacaggtgacggcgaaaggtcgcttgctgatccgcaacatttgcatgtgctttgatacctatctgcgccagaaagcgcggatgcagcagttctctcgggtgatttaaatagtgaatggcgcttcgtttacaaagtagaaaacgaaagcgccatcaatgtgctgagaacaagattgcctgatgcgctgggcaacaaaacctgttgaaattattgcttttgtaggccggataaggcgtttacgccgcatcaggcatctgagcatgatgcctgatgcggcgctggtcgcgtcttatcaggcctacgactttctccgcatccggcataaacaacgagcttcagctaaacagcccaatcattgcggcacacagcacggcagcaacggcagtttgcggtgtgtggctgtcaactgcgccactcgataccagattaattattgattccagcataatgactctccccgttttccgggcaagatcatactgaacttatcggaacagtaaagcgtaaaataccagcaatttgcgctcaataatcaatctttacacacaagctgtgaatcactccatccccagctcttttaacttacgcgtcagggtgttgcggccccagccgagtagccgcgccgcttcctgtttatgcccctgcgtatgtcgcaacgcggtcgtcagtaacgtccgctccagctctggctgcgcttcggaaagcagattttgatgaccggaacgcagcgctctgtctgcccactgcgcaagaagcgtcgcccagctgtccggttgcatttggctagtactctccgcaaccgtactttcaaacagttcgccgggcaaatcctgaatcaacacttcctgcccggcggccatcaccgttagccagcggcaggtgttttccagctggcgcacgttgcctggccacgccagacgcgtcagagcagcttcggtttccggatgcagtaacttcgcttctacgcccagttcgcgcgcggcaacctgtaaaaaatggcgcgccagacggggaatatcttcccgacgttcgcgcagcggcggcagatgaacgcggataacgttcaggcggtggaacagatcctcacggaacttaccttcctgcactcgctgttcgagattctggtgagtggcagcgataatccgcacatccactttcaccggcgcatagccgccaacgcggtaaaactgaccgtctgccagcacgcgcagcaaacgcgtctgcacatccagcggcatatcaccaatttcgtcgaggaataatgtaccgccatcggcctgttcaaaacgcccctgacgaatggtattcgcgccagtaaacgcgcctttctcgtggccaaacagttcactttcgatcaaatcttttgggatagctgccatattcagcgcgataaacggcgctttggcgcgcggactgtggcgatgcagggcatgagcgaccagttctttaccggtgccggattcgccgttaatcagcacgctaatagaagaacggctaagccgaccgataatacggaacacgtcctgcatggctggcgcttcgccgatgatatcggtcgttgggccgttaagctgaacattacgcggctgctgctgttcctggtaatgactgatagcgcgctcaaccagcgccactgcttcgtcgatatcaaacggtttgggcagataatcaaacgccccttgttgataggcgctgacggcagcatccagatcggaatgtgcggtcataatgatgaccggaagcattggatggcgctgtttaatctgcttgagcagcgccagcccgtccattcccggcatacggatatcactaagcagcacatccggcgttttgctcgccagcgcctccagcacttctgcgccgttctcaaacgtcgtacaggttaaacctgccccagcgagcgcacgttcaagcacccaacggatggaactatcgtcatcgactacccagactatccctcgttgcataaacgtcacctttatttcctgataggcaggtaaacgctgaactcggtatgccctggccaactggtaaattcaattttgccactatgctgatcaatcaaattacgagcgatggataagccaagcccggtgccaccttcgcggccgctgaccatcgggtaaaacagcgtatcctgcaaatgaggcggaatgcccggcccgttatcttccacatcaatccgcgccgccagccggtagcgctcgccgtgtaaggtcagttgaaacgcggtgcgggtacgcagaatgatttcaccgccttccggccccagcgcctgtagcgcattgcgcacaatattcagcaagacctgttcaatttgatccgggtcgtgcgccagttccggtaggctgggatcgtaatcacgaatcaaccgcacgttgtccggcagttccatgctcaccagcgttaccacgcgttcagccactttgtgaatactttcggtaacgcgcgtaccgggcagctgcggccccaacagacggtcgaccagatttcgcagccggtccgcctgttcgataatcactttggtatattcgagtagacttgggtcaggtaacgctttgctgagcagctgcgccgcgccacgtaaaccgccaagcggatttttaatctcatgtgccaggccgcgcactaaatcacgggcagcaacctgctgggcgtgctgtagctgttcctgacttaagcggcgctggttatccatcggagccatctccagcaggatcatgccgtccggcatacgctgggccgtcacagaaaggatatggctgcgcccgtcgatgaccagcgtcacttcgttatcggtaaaaccttgccccgcctccagactttcttgcatcagctcgatatttaaactgaagtagctcaacagttccggtaacggtgtaccaaacaatttgcgggagctttgggcgagcagttgttgcgcggcagggttggcgtaatggatcgccaggttgtcatcgattaacaaaatactgttaatcaggctgttgaggatctgcccagcatcgggctgcgtgcctgttgccataaagcagtctcctgaacaggttgcaccattttagtgcattatagctttttacggataaaaagcgcgaagcatcagagaattgacggagaaaaaagcccatgcagagatgggctacagatagctgacaaacttcacgttggagagcgactcacctgctccggcctaccacatcatcaccgtgtaggccggataagacgcatttgcgtcgcatccggcgtgatgtgcttgccaccgatcccaggcctgccagagacaggcgaaaagtttccacggcaactaaaacacttagacgctgtagtacagctcaaactctaccggatgcggagtcatacgcacgcggtcatcttcttcgcgacgcagagcgatgtacgcatcaattgcttcgtcagtgaacacgccaccggctttcaggaactcgcggtccagatccagttcgttcagtgcttcttccagagagcctgcaacctgtgggatctctttcgcttcttctggcggcaggtcatacaggtttttgtccatggcttcgcccggatggatcttgttcttgataccatcaagaccggccatcagcagggcagcaaagcacaggtacgggttagctgccggatccgggaaacgtacttcgatacgacgtgctttcggagaagaaaccaccggaatacggatagacgcagaacggttacgcgcagagtaagccagcattaccggtgcttcatagcccgggaccagacgcttataagagttggtggtcgggtttgccagggcgttaatcgctttagcgtgtttgattacgccgccaatgtagtacagcgcctgctcagacagacctgcgtatttgtcgcctgcgaacaggttaacgccgtttttagacagagacatgtggcagtgcataccggagccgttatcaccgaacatcggttttggcataaaggtcgcggttttaccgaagcggtgcgctacgttgtgcacaacatatttgtagatctgaatttcgtcagcttttttggtcatggtattgaagcgggtagccacttcgttctgaccagcagtcgctacttcgtggtgatgggcttcaaccaccagacccatctgttccatcaccagacacatttcagaacgaatatcctgagcgctgtctaccggtggaaccgggaagtaaccgcctttcactgccggacggtgacctttgttaccaccttcgtattgggtggaggagttccatgcgccttcgatatcgtcgatagcaacgtgggaaccggagatagaacttccgaaacggatgtcatcgaacaggaagaattcaggttctggcccgaacagtacggtgtcggcaatgccagtggaacgcaggtaatcttcggcgcgcttcgcaatggagcgcgggtcacggtcatagccttgcagggtgccaggttcaaggatgtcgcaacggataatcagggtggagtcggcgaagaacgggtcaatcactgcggtggatgcgtctggcatcagcaccatgtcggactcgttaatgcctttccagccgccaatgctggagccgtcaaacattttgccttcttcgaagaattcagcattcacctgatgagcagggatagtgacgtgctgttctttacctttagtatcggtgaagcgcaaatcaacaaacttcacttcgtgctcgttcagcatcgtcagtacgtgttcagcggacatactttaactctcctggattggtcatggtcgtcgtggtaacgaaatctgcaattattttggccgtgtcgccgtaaaaaagataaagcgaaatctgtgccaacttttaaattgcccctaaaaggcgttatcatgcgcaccatcgtgcaaaagggctgcaccacgatgtgaatgttgcaccaatatagtgcttcaatggaaacattaagcaccatgttggtgcaatgacctttggataaccctttttatgctccgtgaaagcgatcacaaagggactctgcaatacttgtttgcggaggatgtttgtgatcctgttttgtagtgcgattaatccgtgtacaataacgcgctatttctaatgcctgaggcaaagttgtgatcgaaaaattgcgtaatatcgccatcatcgcgcacgtagaccatggtaaaaccaccctggtagacaagctgctccaacaatccggtacgttcgactctcgtgccgaaacccaagagcgcgtgatggactccaacgatttggagaaagagcgtgggattaccatcctcgcgaaaaacaccgctatcaaatggaatgattaccgtatcaacatcgttgataccccggggcacgccgacttcggtggtgaagttgaacgtgtaatgtccatggtagacagtgtgctgctggtggttgacgcatttgacggcccgatgccgcaaacgcgcttcgtaaccaaaaaagcgtttgcttacggcctgaagccgattgttgttatcaacaaagttgaccgccctggcgcgcgtcctgattgggttgtggatcaggtattcgatctgttcgttaacctcgacgcgaccgacgagcagctggacttcccgatcgtttacgcttctgcgctgaacggtatcgcgggtctggaccacgaagatatggcggaagacatgaccccgctgtaccaggcgattgttgaccacgttcctgcgccggacgttgaccttgacggtccgttccagatgcagatttctcagctcgattacaacagctatgttggcgttatcggcattggccgcatcaagcgcggtaaagtgaagccgaaccagcaggtcactatcatcgatagcgaaggcaaaacccgcaacgcgaaagtcggtaaagtgctgggccacctcggtctggaacgtatcgaaaccgatctggcggaagctggcgatatcgttgcgatcacgggccttggcgaactgaacatttctgacaccgtttgcgacacgcaaaacgttgaagcgctgccggcactctccgttgatgagccgaccgtttctatgttcttctgcgttaacaccagcccgttctgcggtaaagaaggtaagttcgtaacgtctcgtcagatcctggatcgtctgaacaaagaactggtacacaacgttgcgctgcgcgtagaagaaaccgaagacgccgatgcgttccgcgtttctggtcgtggcgaactgcacctgtctgttctgatcgaaaacatgcgtcgtgaaggtttcgaactggcggtatcccgtccgaaagttatcttccgtgaaatcgacggtcgtaaacaagagccgtatgaaaacgtgactctggacgttgaagaacagcatcagggttctgtaatgcaggcgctgggcgaacgtaaaggcgacctgaaaaacatgaatccagacggtaaaggccgcgtacgtctcgactacgtgatcccaagccgtggtctgattggcttccgttctgagttcatgaccatgacttccggtactggtctgctgtactccaccttcagccactacgacgacgtacgtccgggtgaagtgggtcagcgtcagaacggcgtactgatctctaacggtcagggtaaagcggtcgcgttcgcgctgttcggtctgcaggatcgcggtaagctgttcctcggtcacggtgcagaagtttacgaaggtcagattatcggtattcatagccgctctaacgacctgactgtaaactgcctgaccggtaagaaactgaccaacatgcgtgcttccggtactgacgaagccgttgttctggttccgcctatccgcatgactctggaacaagctctggagttcatcgatgatgacgaactggtagaagtgactccgacctctatccgtattcgtaaacgtcacctgacggaaaacgatcgtcgccgcgccaaccgcgcaccgaaagacgattaatttcgttttttagtcataaaaaacctgccagcgatggcaggtttttttttgcctgtcgtgagcgcacaccaatgcgagtatctcccttataagtctgtggttacgtcaatagagagctttgtcacaattatctgcaaagtcatacgccgttaattgctttcttttttggcgtaagcgtaagatgcttcatctggtttaaaccaaaaggattaaacaatggcggagaatcaatccaccgtagaaaatgcaaaagagaaactggatcggtggttgaaagatggcatcaccacgccgggtggaaaactccctagtgaaagagagctgggagaactgctgggcattaaacgtatgacgctgcgccaggcgttgttgaacctcgaggcagaatccaaaatcttccgtaaggatcgtaaggggtggttcgtgacccagccgcgatttaattacagtccggagctgagcgcgagctttcagcgggccgcaattgagcaagggcgagagccttcctgggggtttaccgagaaaaaccgtaccagcgatattcccgagacgctcgcgccactgattgcagtgacgccaagtactgaactctatcgcatcaccggctggggggcgctggaaggacataaagttttctatcacgaaacatatattaatcctgaagttgctccgggctttattgaacaacttgaaaaccacagtttttctgcagtctgggaaaagtgctaccaaaaagagacggtagtaaaaaaattgattttcaaacccgtcagaatgccgggcgatatcagcaagtatcttggcggttctgcgggtatgccagcgatcttaattgaaaagcatcgcgccgaccagcaaggcaatattgtccaaatagatattgaatattggcgatttgaggccgtagacctcatcattaatctgtaagtgttttatggtgacaataaataacgcaagaaagattctacaacgtgtcgacactcttcctctttatttacatgcttatgcctttcatttaaatatgcggctggaaagagtgttgcctgctgatttacttgatatcgcaagtgaaaataatctacgtggcgtcaaaatccatgttctcgatggcgagcgtttttctcttggtaatatggacgataaagaactctctgcctttggggataaagcccgccgtctgaaccttgatattcatattgaaaccagcgccagtgataaggcatctattgacgaagccgtcgccatcgcgttgaaaactggggcaagctccgtacgtttttatccacgttatgaaggtaatttgcgcgacgtattaagcattatcgctaacgacattgcctatgtacgggaaacgtatcaggacagcggcctgacttttacgatcgagcagcatgaagatttaaaaagtcatgagctggtgagcctggtcaaagaaagtgagatggaatctctttccttactgtttgattttgcgaacatgatcaatgcaaatgagcatcccatcgacgctttaaaaacgatggcaccgcatattacccaggtccatatcaaagatgccttgatcgttaaagaaccgggtggcctgggtcataaagcctgtattagtggtcagggtgatatgccgttcaaagcgttattaacgcaccttatctgcctgggtgatgatgagccgcaggtgacggcatatggcctggaagaagaggttgattactatgcgccggcgttccgctttgaagacgaagatgataatccgtggatcccttatcgccagatgagtgaaacaccattgccagaaaatcatttactggatgcgcggttacgtaaagaaaaagaagatgcaattaatcagataaatcatgtgcgtaacgtactacaacaaatcaaacaagaggcaaaccatcttctgaaccactaataagttttaactcatacgcagttaataaaaccattccatatgaatggtcggtatcttattgcctttaaaacagtgattttaaaaatcgcttaggggatgttatgctcacgaaaaagaaatgggcgttatttagtctattaacactgtgtggcggtacaatttataaattaccgagcctgaaagatgcgttttatatcccgatgcaggaatatttccatttgaccaatggtcaaattggtaatgctatgagcgtaaacagttttgtcaccacagtgggcttttttctgtctatttattttgccgataaactaccgcgcagatacaccatgagtttcagtctcattgcgacaggattactgggtgtttatttgacgacaatgccggggtattggggcatcctctttgtctgggcgctatttggcgttacttgcgacatgatgaactggccggtcttgctcaagagcgtaagtcgattgggcaatagcgaacaacaaggtcggttgtttggcttcttcgaaacagggcgtggcattgtcgataccgtggtggcattttctgcgttggcagtatttacctggtttggcagtggcttattaggttttaaagcaggcatctggttctattcccttattgtgattgccgtaggcattattattttctttgtcctgaatgacaaagaagaggcaccgtccgttgaggtgaaaaaagaagacggagcaagcaaaaacaccagtatgaccagcgtgctgaaagacaaaactatctggcttatcgcttttaacgtcttcttcgtttacgcggtttactgtggcctgacattcttcattccattcctgaaaaacatctatctattgcccgttgcgctggtgggggcttacggcatcattaaccaatactgtctgaaaatgattggtggaccgattggtggcatgattagtgataagatcctgaaaagcccaagtaaatatctatgctacacctttatcattagtaccgctgcgctcgtactgttgattatgctgccgcacgaaagtatgccggtctatttagggatggcatgtacgctgggctttggcgcgatagtctttacacagcgagccgtattttttgcacctatcggcgaagcaaaaattgctgaaaataaaacaggtgcggcgatggcgttgggtagctttattggttacgctccggcgatgttctgcttcagtctgtatggctacattctggatttaaatccggggattattggctacaaaatcgtgtttggcattatggcctgcttcgcattcagtggtgcggtggtttccgtaatgctggttaagcgtattagccaacgtaagaaagagatgctggcggctgaagcttaattaatggccggatgtgcttaatccggccaacgaaaaccgtatcaaccgtaggccggataaggcgtttacgccgcatccggcagtttcacatcagaagaaatacttcgtcccgatacggatctggttttgctcgcggtggtacggttcgacgttgcggtctaaccagcgcaattcgaaataagggagccagtgttcattaatacggtaacggaaggtgttagtgatttcccaatgatgatctttcccgttgctactattaaagtcattcactcgcatgaagtaatgtggctcaaatgtataggaaaatttatcggtgattttaaaattccagtaggtgccaatttcataggtgtcattattatccagttccccgctcaaatctgtactactatagttattatggttatagcgatttcgtactgtcagattaaaccatggtacaaatttatagttgacgtccagatacactgcaccaccgctaccgatactcttatcattaattaagccaccgggctggatggttaatttatcggttggtttaaataacggataccagccttcaatttcgttatatccatgttttagttcatcttctcgctgaaagttgtaggtattggttaacataatacccgcgcccatatcgaagttataacccacacgtagcataacctcgccctgatcggaggcaagattatatgcctccctgttttcgacgtatgcgccagcaaatacgctggcagaggtcagagaagataataaaattattgcattaatctttttcataataagtccattttttaaacgtagggaggccgccacccaccaggatggaaatagcggctattgacatttataacgttacggaagccgttttttcttctgtcgccatctctttatttttgcgttggttgatttcctcaataatcaatgcaaaccgtttttcattgagtgtgtaaaagaatcccatcgtcaatgcagcaataattgccagtgcacaaggccagataaaaatgagctgacgcaaaccctgtaatgtcgcatcgctttgcgcgatgttgggaacataaccaatttgcgtcagcataatgcctggcaagaagccagcaagtgcggcagaaattttacgaaagaaggtataaccggtataaacagaaccttcggcacgaataccggttttccattcaccgtaatctacggtatctggtaccagtgcccagttcaggctgtttacaaaggccgtgccaaaaaaggcgacacaagagaacatgacgaaagtgaaagagttacttccccagaaataattcagtatatcacccaccgcccacagcaccatgccagccagataaacctgttttttaccaaaacattttacagttaatggcaccagtaatacgccgatgaggatgcatcccatactgaagaatcccatccagctcaataaattaatatcattcagcacatactgggtgtaatagacctgaatcgccagtttgatattaaatgccgccagggtacacaagttagcaatgcataaaaccagcaatggcggattccgaaatatcgcgcaaaaacttttgagaatactggctttatgtccggttggcgttgtgtccacataatgctctttgacgcctctgtagcacagcatcataaaaataaagccgccaatggagaacataagtgccgcacaggcataaccgacggtactgtcagaaaaaaggctctgcaacggaataaacgccacggtacaaatcaatagccctatggttgcaccaccctggcggtaagccgcgagctgcgcgcgctcattcgggtttttggtaattgccgggatcatcgcaccatagctgcagttcatcagactgtaactaagtccaaacatcataaacagcgcggtggcaatcgtcgttttaaccggcaaacaaaaggtggtggcgataaactggagcgttgcaattaacgccgccggaaccgctgcatataaaataaagggacgaaatttgcctttaggcccaatatttttccggctgtcgagtaaaaatccggtgagcatatcggtaaacgcggtaaaaaacttcgccaccagaaagataatcccgccatagtaagcaggcatccctaattcatcggtataaaatttgaggagatacagagtaccgatgcagagcattaaattgctaccgacgtcgcccataccataggcgattttttcccgcagattcagttttaatgtcagtggattatggtcagacataatcactccttataacgccccgcagggcgtcgtttattattattacgccgtgcgtttacgggcttctatctcttccacaatgcggacatacatcttctcgttcaggctgtagaagcaacccatcgccacaatggtgactaccgccagtgcgcttgggtagatgaagatcaactggcgtaacccttcaatggtgtggtcagcctgtgcgacgttcggcacatagccaatttgcgtcagcatccagccggggaagaaaccagccagcgcctgagacactttgcgaaagaaggtaaaaccggtgtagaccgttccttcgctacgcacgccggtgcgccactcgccgtactcgacggtgtcggaaaccagcgcccagttcaggctgttaacaaacgcactgccaaagaacgccaggcaggagaacgccacgaagctgacgctaccgccgccgaagaaatagttgagcagatcgcccagcacccaaatcagcaggccgccgatataaactttcttcttgccaaaacgtctgacactggcaggcatcaggaatacgccgatgaaaatacagcccatgctgaaaaatcccatatagctcaacaggatgggatcgttaagcacgtactgggtgtaatagacctggatggcgagcttgacgttaaacgcccctaaagtgcagaggttggcaatgcacagaatgaacagcgggcggttacccgcaattgcgcggaaagattgcagcaggcccggcttttgcgccggattagcaggctgggtttcgacataacgctctttcacgccgctgtagcagatccacataaacagcaggccaaacagactaaacagcgtggcggcgaagatatagccaagttgctgattaccttcgataagattcataactggcacgaatcccaccgtgcacagcagcaggcccagcgtagcgccgccctgacgccatgccgccagactggcgcgttcgttggggtttttggtgatagcgggaaccattgcgccgtaggagcagttcatcatgctgaaaaacagtccgtaaagcataaacagaatagtggccatcaccgttttaccggtgacatcaaacggtgtgccgacaaagttggcgatcgccagtaaggtgaccgggaaactcgcatacagaataaaaggacggaacttaccttttggaccgatcttgcgtcgggaatccaacataatgccggtacccatatcggtaaacgcagtaaagaatttactaatcaaaaagataatgccgccataggtgcctggcagccccagaacgtcggtataaaacttcaaaagataaagcgtaccgatatccagcaggatgttagaggccaggtcgccaataccgtaagagagtttctctttaaagggcaggcgtaaagttgctggatcttccgttgtgatgtgactcatgcttgttctccctttgcccatgagtttccccacgggcggatgtgattagatgctttttaagctcgcgaacagtgccgcccattcgctatcggcgcgataaaagaccggcggcttgccgatgggcgcattaacggtaacttccccgccccggaacgcttcacccgtccaggcgtggacccagttatcctccggcagatagagcgtccagtcgctacggccttcttcatgcaccggagcgaccagaatgtcgcgacctaacaggtactgatatttcagggtgtaagtgtgcgcatcgtcttcgtaatgcaggaacagcgggcgcataaccggcaggccggacttcgcattcagcgcgacggcctctttcaggtaaggtttcagggtggtgaagacggtggtcatacgggcgaaatgggcgatggtttctgcgtcgccgtcaaactgccagttgtcgccaggacggttaccttcgtgggtgcgcatcatcggcgtgaaggcgctgaaatcgcaccagcgcagcagcagctctttgctgcgcttcatctcaaacagggtggtgtaaccgccaatgtcgctgtggtgcaggccatgtccggtcattgccaggctcagcgccgccgggacaacgctcgccaggccatcgtcgagactccagtcgacgttctggtcgcccgcccacatcatggtggagtatttctggctaccggtagaaccggcgcgcataaagaaaaggatctcgccgagcttgcccgtttcttcaagggcttcgtagttacacttcgcccacagcgcaggccaggcgttatgcataatttcggcactgacgccgttatgcaagtacgtgtcggtgggcagatactcgccgaagtcagccatccagccgccgcagccgagttcaatcatgttctttttgatcacttccttgaaccaggcgtaggcttctggattagtgagatcgacaacgccgccgtaaaactcgccaaactccaccagatagtcaccgccagaggcatcttttgccagatagccgtgttgtgccgcttcttcgcagagatctttatcgctggcaacatacgggttgatataggccaggaactgcacgccctcctgattccactgcttaatgcgactatccagttgcgggtagttttcgctgttccacttccagttccacatcacgcgtttgccaaaagaggtcatacgaataccggaccagtcctgcgcccagatgccgttgaccttcacgcccgcgttacgcatggtgtccagtttcttctggcacacttccgtcccgccctgaatgccgagcgttactccgtcataaatccagtcgggcagttctggctggcgtcccagcagggcggttaatttttccagcagggaaatgtatgtgtcagcacattcaaaacgcagcgttgctttgtcttcccacagcgccagttcatggtattccggggcactaaagtcgaagttcatatagcaactgttatcaacatggcagtaatacttctgcgtgctgacaaacgtaggctgtgggaagaaagtccagtaatagtcgccgcccgcattttctttgcagtcggcctgccaggtgacataggtttgtttgttgcgaccaacgccttgttcactggtccatagcgggaacggtttgccacgcagatcgaagtaggaaaactgttcgccgcagccgtagatatggtcctctggttgagcggcaaggcgcagccagatacggttgtggttaaggttgtcgttttgtagttccagcaataaacgcccctgatcgtcggcagagatattcagcgtggcgctaatgtcagaaccacggctgaaatgaattaaccaaccatccggactctggctgacgatggcgtcggtaagcgcaattttctcctgtagtttatctttaatgctgaaattaccgcggaacatatcgatatccgctataccactgccaatccataaacaaggattatctttgctatgggttaaaataagacgttgttgaaaatgtagggtaaaactgtcgttattctgatgaaattgaaaatctaataactgtggacgtggcgtatccataactaatctccatagagttgagaacgagattgttgccttcctgttattacaggcttatgtaaaatgattctcataaaactgatatataaaaactttacagaagctgagctgtttttaacttaataaattgaagatacataatgttgcctttagcgagtgaaatgttcttcaatgattttgactgctaatcaatacaagttattttctctgtccgtaaatattaaaaaacaggcggtgcggttttccactttccagtaataataagtcgataccactattaaaggcgttaggcgggcaactcataggttcaactgccagtccctgacgctgtaatttttcaccgctataaacctgcacccagagttgatcggaacaaaggcttacgctaagcgcctgctgtggatgggtaatggtcatttcccacaaatcattagcggttttaaaggtgtggtcgatttttgtcgcggctatttttttcgcctgcgtgaaatttaaatccagctcatcaacgtggtgaagcgttgtcggattcgcgtgctcatcgacggcataaacctggtttgccggaagctggaacagatattcatcaacagatgttaagttgcaggttaaataaggatgaatacccacgccataaggcgctgcgacagtgccgatattctggcttgcgatctcaacggaaagacccgtgtgtgcgttgaggctataaacaacttgactagccagcataaacggatagccgtaactgggcggcagaaaagctgtcagggtaacgctggtggcggttaattcactaatttgccagtctcgccaggcaagcagcccgtgaatagcggctttactactatgttcattaatgggtaactgatattcctgcccctgatagcggtaacagccgttggcgatccggttcggccacggaataagcactttacccagatgcgccagcggcatctcttcgggtttgtgcgggatgactaaatgacaaccctgaaaggttaattcagccagaccagcaccgacggtcacaatggtcgcgtgataatcccccgcggcaagactaacggtctgtccactgcaatgcatattggtgatttgcatacaaggcaccttaattaagctcatacagcctcccgtgaggctgatgtcaaacccaaaaactgcaccggacggtcccctcgcccctttggggagagggttagggagaggggaaaacccgcaccctattttcagatcagttatttcgcattaatatccagcagacccgctgcaaccgctggagccatgccgggcgctaacgggatacgcgggatcaccaggcaatgcagcaggtgataaatatcctgtttgccgtcccagactttggtggtgaccttattgtccgcatccagctcctgccaccaggaaccattttcatagtccatcaggtacttaatgcagtactcccaccatgtttgataccaggtttcatactggcgatcgccagtgacggtgtagagcgcgtaggccgtacccattgcttcgacgataggccaacgtacacgttcgcggaccaccggttttccttcccagtcaacggtataaacaatcccgtccgcgccatcgggtgcccaggcatcgcgcacggtggcgttaaacagacctttggcatcttctagcagccatgctggtggttgttcgcaacgggcttccagggcagcatggatgtgcagcattaaacggccccattcgatccagtggcctggtgtacctccgaacgcgcggaagcgatgcgccgggttatctttgttgtaatccggcagcggattccactgggtatcgaagtgttcgttaacgcgataatgattatttctggcgacgtcgtggataatcacggaagccacgcgaatcgcgcgatccagccattttttgtcgtgagtgacgtcataaacaatcaagaaagcttccaccgcgtgcatattggcattgccgccgcggtactcttcggttttgctgaaggcttcgtcccaggattccaggcacatctgctcttcttcgctccagaaatatttctcgataatttcaatggtgtaatcgagcagcttgcgcgcttccgggtgacccgttgtgacggcgctggcggcacccagcagagcaaagaagtgttgatagccctgtttggaggcatccaccacgccctcgtcattcacgcaggcataccagccgccatattttttatcacgcagtgcgccgttcatggctttgataccgtgatcaaccaagctgtaagcgccaggtcgacccatcgccgcagcaacggaataaacgtgcaacatacgagcggtgatccacagatgggtgcccatctcttctttgatttgccctttattgcctaaccagccaaaaccagtcggcactacggaatttttaccaaaatcaaagatgcggtcggtttcctgttccagccaacggttgtggcttagggtgttaaaccatttcattccttttatcctcatcttagcggcgtttagccatcatttcgtcgacgatatcgccaagttgttgtaatttcggtgcgcaaacgtcacgcagcatcagctcgttgtctggtaaaccgacgacgcttgcccagactgcacggcctgccaggaatccgcttgcgcccgccgtcattgccacgcgtacggcacgcgggaacagtttttcgtcgacaccggaagagaggatcacccatggcatattgatatggtcattcagacgttgactagcacagagaagctcttgttgcggacctttgccataaagcggcatttcaactttgtagaggtcagcgccactgtcgcccagctctttggcggcatcgatgatcgcttgttcgcgatcgaatttatcgccacgacgcggtgggcggacgactggctcaatgatgcttaccagaccgtgactgtggcacagttcgttgaactctttcaccatatccagacgttgctgcgcatcttcatcactacgccacagcaccagcagttttaaggctttgccaccgtcttgtttgatctgtagcggattgattttgcggtcaataaccacgctatcgaccggaataccgttgccaggaatgaactcatcggcggcgacaatcatggcgcaacttttggcaatcgcgttttgctcaaccacctggcggtagcagaattgttgatctaccagaatcgcgctggcataagggctgagggcctttgcagcgttaactttgaaatcagttaaaacgctatcggctaccggagcgggtgccccagccgcggcaaacatcatgcgcatggcttcgcgctgatcgaccgccagcatggcaaaaccgccgcttgcgcgcgtaatgtcgttgatggtgtacttattcattcatttattcctttatccagtcgttacatttttactttggcagtcatcccggcactgacacggacctgttccagaatggcggaccagtcctggcgaccgcgacccgctgcgcgcgcctggctataaacctcccgactggcggcccccagcggcattggcacatgcagctggttggcgacatcaagggcgatgccaagatccttatgggcaagatcgatcatgaaggcgggagaaagatctccgctgaggactttgtttggccaggaagtggtgaagtgacctttaccggcggcggtaccgctcatcactttgacggcaacatcgaagggaagattcagggcttcgcacaaaacggcggcttctgcgctaagcgcattgagcgcgatgctcatgtagttgttgatgagcttaacgcggatccccatgcccggaccgccagcgttgatcaactcactgcccatcgccatcaggatcggtgtggcacgttcaacttgttcagcggtgccgccagccagcagtaacagagtaccggtaatggcatttgcagaagtacggcctaccggaacatccatcatgctgaagcctttggcttgcatatcggcaatcaatttatcggtttgcagcggatggatggtggacatatcaatgaccagcgcatcggtagataagccttcgcaaacgccgttttcaccgaacaacacgttgcgcaccagatcgccattcggcaacatggtaatgataaattcggcatctttagcggcctgcgccgggttggcggcgggagtcgcacctttgtctaccagatgccgcacagcttcggcgttcacatcaaagacgcgaagttgatgcccttgctgcaataaattgctcgccattgggctacccatttgtcctaaaccgataaacgcgattgctgccataaccctctcctgaatacagttatgtcactttttgtcatttatgacatgctttgcttgtctgtttttgatcgtatttgtaatttatcgtcaaaaaattgacagccgtcactttttaaacaattggtgaaattaaaatgaacgcatcccaaaatgtttaaggaatgaccatgattcgtgttgcttgtgtaggtataaccgtgatggatcgcatctattacgtggaagggttaccgacggagagcggtaaatacgtggcgagaaattatacggaagttggtggcgggccagcggcgacggcagcggttgcggcggcaaggctgggggcgcaggtcgattttattggtcgcgtaggtgatgacgacacgggcaacagcctgctggcagagctggaatcctggggcgttaacacccgttacaccaaacggtataaccaggcgaaatctagccaatccgccatcatggtggataccaaaggcgagcggataatcattaactaccccagcccggatctgctgcctgacgcagagtggttggaggaaattgatttctctcagtgggatgttgtgctggcagatgtacgctggcacgacggcgctaaaaaagccttcaccctggcccgtcaggcgggtgtgatgaccgttctggacggggacattacgccgcaggatatcagtgagctggtggcattaagcgatcacgcggcctttagtgaaccgggtctggcgcgcttaacgggcgtgaaagagatggccagtgcgctaaaacaggcacaaacgctcacaaatggtcatgtctatgtgacccagggtagcgcaggctgcgactggctggaaaatggtgggcgtcagcatcaaccggccttcaaagttgatgtggtagataccacaggtgcgggtgatgtttttcacggcgctttggcggtggcgctggcaacaagtggggatttagcggagagtgtccgcttcgccagcggtgtagcggcgttaaaatgcacacgtcccggtggacgagccgggatccctgactgtgatcaaacccgatcttttttgagtctttttgtataaaatgccagggtgatggtttttcgaggaattttcatgagccttaccgaactaaccggtaacccgcggcacgaccaactcctcatgctgatcgccgagcgtgggtatatgaatattgatgagctggcaaatctgctggatgtctccacgcagacggtccgccgggatattcgtaaattaagcgagcaaggcctgattacgcgccatcacggtggcgcgggtcgggcttccagcgtcgttaatacggcgttcgagcagcgtgaggttagccaaaccgaggaaaaaaagcgattgccgaagcggtggcagactatattcctgatggtagtacaatatttatcaccattggtacgactgttgagcatgttgcccgggcgttacttaaccataatcatttgcggataatcaccaacagcctgcgtgtggcgcatattctttaccacaacccgcgctttgaagtgatggtgcccggcggtacgttgcgctctcataatagcgggatcattggccctagtgcggcgtcctttgtggctgattttcgtgctgattatctggtaacaagcgttggggcgattgagagcgatggcgcgttgatggagtttgatgtaaacgaagctaacgtggtgaaaacgatgatggcgcacgcgagaaatattctgctggtcgccgatcacactaagtatcatgctagcgcggcggttgaaattggtaacgtggcacaggtcactgcgctctttaccgacgagctgccgcccgctgcgctaaaaagtcgcttacaagacagccaaattgaaatcattcttccccaggaagacgcgtaaatttttgtgaccgttaacctggcttcataccttgccacatagccaaacccatcctttcccgctacagttaatttcttgtggcgcgaaaggaggcaaaaatgctctatatctttgatttaggtaatgtgattgtcgatatcgactttaaccgtgtgctgggagcctggagcgatttaacgcgtattccgctggcaagccttaagaagagttttcatatgggggaggcgtttcatcagcatgagcgtggggaaattagcgacgaagcgttcgcagaggcgctgtgtcatgagatggctctaccgctaagctacgagcagttctctcacggctggcaggcggtgtttgttgcgctgcgcccggaagtgatcgccatcatgcataaactgcgtgagcaggggcatcgcgtggtggtgctttccaataccaaccgcctgcataccaccttctggccggaagaatacccggaaattcgtgatgctgctgaccatatctatctgagccaagatctggggatgcgcaaacctgaagcacgaatttaccagcatgttttgcaggcggaaggttttagtcccagcgatacggtctttttcgacgataacgccgataatatagaaggagccaatcagctgggcattaccagtattctggtgaaagataaaaccaccatcccggactatttcgcgaaggtgttatgctaaaaaccattcaggacaaagccaggcaccgtacccgtccactatgggcctggctaaaactactctggcaacgcattgatgaggacaacatgacaaccctggcaggtaaccttgcctatgtgagcttgctcagtttagtgccgctggttgccgttgtttttgcgcttttcgccgcttttcccatgttttccgacgtcagcattcagttacgtcactttatttttgccaactttctgcctgctactggcgatgttattcagcggtatatcgaacaatttgttgccaattccaacaagatgaccgccgttggggcgtgcgggctgatcgtcaccgcgttattgttgatgtactccatcgatagcgcgttgaataccatctggcgcagtaaacgagcgcgaccaaaaatttacagcttcgccgtgtactggatgattttaacgctggggccgctgctggcaggggccagtctggcgatcagttcctatttgctctccctgcgctgggcgagcgatctcaatactgtcatcgacaacgtgctgcgtatttttccgttgctgttgagctggatctccttctggttgctgtacagcattgttcctgccatccgcgtacctaaccgcgacgcgattgtcggcgcgtttgtcgccgcactcctgttcgaagcaggaaagaaaggtttcgcgctttatatcaccatgttcccgagttatcagctcatttatggtgtgctggcggtgatccccattctctttgtttgggtctactggacatggtgtatcgtcttgcttggcgcggaaattactgtcactctcggggaataccgcaaactaaaacaagcagctgaacaagaagaagacgacgaaccatgattgcattaattcaacgcgtaacccgtgccagcgtcaccgtggagggagaagtgacgggcgaaattggcgcgggacttttggtgttattgggtgtcgaaaaggatgacgacgaacagaaagcaaaccgtctgtgcgagcgtgtgctcggctaccgcatctttagcgatgccgaaggcaagatgaatctcaacgtgcaacaggcgggcggcagtgtgctggtggtttcccagtttaccctcgccgcagataccgaacgggggatgcgcccaagtttctccaaaggtgcaagtccggatcgcgcagaggcgttatatgactatttcgtcgaacgctgccgtcagcaagagatgaacacgcaaacaggacgcttcgctgcggatatgcaggtaagcctggtcaatgatggccccgtgacattctggttgcaggtatgagccagcttccagggttgagtcgggaaacaagagagagtatcgctatgtatcaccttcgggttccacaaacagaagaagaattagagcgttactatcagtttcgctgggaaatgttgcgtaagcccctgcatcaaccaaaaggtagcgaacgcgacgcgtgggatgcgatggcgcatcaccagatggtcgtcgacgagcagggtaatctggtggcggtaggccgactgtatattaatgccgacaatgaagcgtccattcgctttatggccgttcatcccgacgtgcaggacaaagggttaggcacgctgatggcgatgaccctggagagcgtggcgcgtcaggaaggcgttaagcgcgtgacctgtagcgcccgtgaagacgcggtggagtttttcgccaagctggggtttgttaatcagggagaaatcaccacgccaaccaccacgccgattcgccattttttgatgattaagcccgtcgccactctggatgacattctgcatcgcggcgactggtgcgcgcagctgcaacaggcgtggtacgaacatatcccgcttagtgaaaaaatgggcgtgcgcattcagcaatataccgggcaaaaatttatcactaccatgccagaaaccggcaatcagaatccgcaccatacgctgtttgccgggagtttattcagtctggcgacgctcactggttggggacttatctggctgatgctgcgtgaacgccacctcggcggaacgattattcttgcggatgcgcatatccgctacagcaagccgattagcggtaaacctcatgcggtagccgacctcggtgccttaagcggcgatctcgaccgtctggcgcgcggacgaaaagcacgggtgcagatgcaggtcgaaatctttggcgacgagacgccgggtgcagtgtttgaaggcacgtatatcgttctgcccgcgaagccatttggcccgtatgaagagggcgggaacgaagaagagtaactgatggagaggggcggtgctgcctctctcattcaggtcatttatattagtccttggctatttcggttatattaaataagaactctataaatttttattcttcgttggctccatacgtgtcttgctacatcactgttcaggagcatttaaatattatttgtagaactgagtggcaattatcgcagataatgcttaattcatcatcttagttcatgtttgagcgatttttgatagtcaaaaccccctctggtgccatacttttctcataaatatttttaaaatctatagctaacaaatattatgcaaagataatggactagcatcattgtcagtatcattcatttactgctctgtatgttatgaataattatgttgtatgtttgctcttaaaccgtgggaaggaggctataatggttgccaatattaatctcattaaacaagaaagttattctgttgttaatttagaaaaacaactttcccgaactgttaccaacaaaattataacgatgagcaagtaaagaccggttggtggcagtactgaccggtctgtgatgaaagattaatttcaccttaaatcctggtgctgttaggatgctgacgtttttcggctacaccattcagattatgcaaataaatatctctgaatataatatattcatagcacccataattcatcctgggcgataactaaaccatttttgagtaataaatgaaacaactgcaacactcttattatttctggaaaacgcctcgcaaaaacaaaacaacatgcaaaaatccgctttttttaaatgattttccggcgtaattttcgcacatacattaatgagtaatatatgtaaggtattggtaatggcgatgaatacggtttttcttcatttaagtgaagaggcaattaaacggctgaacaagcttcggggctggcgtaaggttagtcgatctgcaattttacgcgaagcggtagagcaatatctggaacgtcagcaattcccggtgcgtaaagcaaagggaggcaggcaaaagggggaggtagttggtgttgatgatcagtgtaaggagcataaggaatgacaaaaatttttcattcttgaatataaaaaacagatgcccttattctggtattaatacaaggctgttttacttgaacttataataactgcaactgttacatcatatctggaaaacgcctcgcaaaaataaaaaatgatgcgtaaatgagctttctttaaagattcggcaagggtacttttctctccatagattcaaaaatgatattggcgagatatttatgaactctctggcaggtatagatatgggcagaattttactcgatttaagcaatgaggtgattaagcaacttgatgatctcgaggtgcagcgtaatcttcctcgtgcggacctattaagggaagcggtagatcaatacctgataaatcaaagccaaacagcaagaaccagtgttcctggcatctggcaagggtgtgaggaagatggtgtcgaatatcagcgtaagctgcgcgaggaatggtaatgggaaaaaatgatgtcaatcagattgctgacaacgtgcgcgttgttcatgccggatgcggcgtgaacgccttatccggcctacaaagtcgtataaattcaatgtattgcagtttattggtaggcctgataagcgcagcgcatcaggcaatcttacgcttgtcatcagtctcatgcccataaccttattgatgtggtggtgggtaaattgaggccaaaccggcactggcggcatagcttgaggtggtaacgcggaatacgagagatggtgtcgtcacaccctatgagctgtaatccgggcgacctgcgccacccggaaaacgtcagagattactctccttcacccggaaacaggaacgggttgatggaactgcgggcatagccttcttgctccattcgtgcgtccagtaccagagaggcgaggtcatctgctacggcttcgatttttggatctttttcctgatagagaattttcaggtaagtgtcgcagtcatcgcagctttcggctttaatcgcggcctgttcgtcatccaggctccagtaatgcagtttgccgctctgctcgcagttgctgcattttacgcgcactacgtgccattcagtttcacacaggttgcagtgcaggtaacgtagcccctgagtggtgccaatttgcaccatgctggacaccggcatagaaccacaaaccgggcaatattgacgttgctcgccgtattcagcgcgggctttgccggggatcagattggccatctgcgcccagtagaggctcagtgcagcccagataaacggcgctttatcgctgctgacggagctgaaatcagaggcaaacagcgcgctggccatatcttccagctcctgagtgcttgccttctccagattctcaatcactgccagcgccgggccgctcatttcaggtttcagctcagcaatcagcgccatcagcagcttttgccagtgcttatcacgcggcagaacgtgaatatccagcgggggcttgccttgtgcgctggcttctttaatgcgcgcagtcagatccatctccagcggatggtcgtacagcaccacttcctgggcgtgggcgataagcgcagcaaagcgcaggtaatcacccagaggattattttctgccagctcgcgcagacgctcggcgcggcggttgtataaattcttgagccgagggaacaataacggcggaatcatatccgccgtacgtttctcgctactacccagctcatcttgcgggattatgcgaatactcattcagctttcttttccgttgtcttgcggacctcacggtaccagcgcgggtgatgtttcttcgcccaggcgctggtaacccatccttccaccatggcggtaatcgtgcctttcacccaaagggcggcgtagatatgcaccatgataaccacaattaacgccactgcggcaaaactatgcagcattaacgcgaatcggatcaccgggatactgaaagcaggcgcaaaataaggacgccagataatcacgccgctcaccagcagcagaaccaggaaaataatcgccgcccagaaaacgcatttctgaccgaagttataacgcccggtgtcacctacttcctcgttgacgacgatcttacgaatattcttcgcccaaaagatatcatcccgattgattaggttgtgatgccagtaacggaaaaacatgatgatgaagctggcaaacataaccacgccgacaaacgggtgcagaattcgcgccagctgcggtgtgcccatgatttgcatcaaccagttgaaggacgggaacaaaaagcccagcccgctcaccgccgccaggatgaagcagaaggcggtgatccagtggttgatacgttccggcgcggtgtagcgcacgatggtgtcacgtcgtttcatttgcgctcctcgtctttctcttcgtgcagattattctcttcctcatccgcacggttcggaccgacacccacgtagtggaagatactggccgcaaaggtagccgcaaagccaacagccgcgagcggtttccagatgcctttccagaatttcacggtttcgctgatttccgggttctccggcaagccatgatacagatttggcttgtcagcatggtgcagcacgtacatgacgtgtgtaccaccgacgcctgccggatcgtacagacccgcattgtcgtaaccgcgggttttcagctcagcaacgcgctcgctcgccagcgttttcatgctctctttcgtaccgaagtgaatcgcgcccgttgggcaggtcttcacgcaggctggttcttgcccaaccaccacgcggtcaacgcacagcgtacatttgtagacgcggttgtcttccgggttgaggcgcggaatgtcgaacggacagcccgcaatgcaataaccgcagccaatgcactgctcggactggaagtcgacgataccgttggcatactgaataattgcaccttccgccgggcacgctttcaggcagcctggatcggaacagtgcatacagccgtctttgcggatcagccattccagtttgtcgttctgctccacttcgctgaagcgcattaccgtccagcttttggcgcttaaatcattggggttgtcgtacaccccaatgttattgccgacggtatcgcgaatgtcgttccactcactacacgccacctgacaggctttacagccgatacaggtggtaacgtcgatgagtttcgccacttcttcctggaagtcccgcgcctgaggcgcgggggtcagaccgttagtcgcggaacgacgaatgatatcttgagattgataagccatatgtcgtctccgttacaccttttccacattcacaaggaaggacttaaactccggcgtctgcgtgttcgcatcaccaacgaatggcgttaaagtattggcaataaagccttttttagctacgccttcatagccccagtgaatcggaataccgatggtatcgatatctttgccgttcgctttcagcgtgcgaatacgtttggtcaccaccgctttggctttgatatagccacggttggaggagactttcacggtatcgccctgggcaatgccaagtttattcgccaggctctccccgatttccacaaactgctctggctgcaaaatcgcgttcaacagcgcgtgtttggtccagtagtggaagtgctcggtcagacgataggtggttccgacatacgggaacttatcggctttacccaatgcttcggcgtcgtctttaaagatacgtgcagccgggttgctgataacgtttggatgcagcgggttagttcccagcggcgtttcaaacggctcgtagtgttccgggaacggaccttccgccatcttatcgagggcaaacagacgccccatgccttcctgctgcatgataaacggcccgacgccgctacccggaggcgctgcgctgtagtccggaatatcccagccggtccacttagtgccgtcccatttcagcaactgacgcttcggatcccacgggttaccctgcggatctgcggaggcgcggttatacagaatgcggcggttaagcggccatgcccatgcccagcccagcgtgttaccgaggccagacggatcggcgttatcacggcgtgccatctggttgccttccggcgtccagctaccggcgaaaatccagcagccacaggaggttgtaccgtcatcgcgcaattgggcgaagctactaagttgttggcctttcttgacgataaccgcaccggttgccggatcggtaatatcggccagcgccttaccgttgctctccatcgccacttcttcactagatggctcatgcggaatggcgtagttccatgtcatgttcagcacctggtccgggttcgcgccaccctgttcggcatacatcttgcgcaagcgcaggaagataccggagaggatctcgccgtcagtcagcgcaatccccggggcgtccgcacctttccagtgccactgtaaccagcgaccactgttaacgatagaaccgttctcttccgcgaagcaggtgcttggcagacggaacacttcggtctggatcttgctgctgtcaacttcgttcagctcaccgtggttctgccagaagttagaggtttcagtgttcagtgggtcgatggtgacgaggaacttcagtttgctcagacaaccgatcactttgtttttgttcgggaaactggcaacagggttaaagccctggcagatatagccattgaccttgccctctttcatcatctcgaagtattgcaggacgtcgtagcctttatcccacttcggcaaccagtcaaagccccagctattttccgccgtcgctttatcaccaaagaaggccttcatcatagagacgaagaatttcgggtagttgccccagtagtttacctggccttccagcagcggttttggcgtgttggcggtaaggtaggtttgcagatcggtctgcttctcgcttggcagcgtcatgtaacctggcaggctctggctcagcagccccaggtccgtcagcccctgaatattggagtgaccgcgcagggcgttaacgccgccgcctgccatccccatattgccgagcagcagctggatcatcgccatcgtacgaatgttttgcgcaccaacggagtgttgcgtccagccgagggcatacaggaagctggcagttttatcgtgagcactggtttctgcgatgtattcgcagactttcaggaacgcgtcttttggcgtaccacagatgttttcaaccacatctggcgtgtagcgggaaacgtgctgtttcagcaagttccacacgcagcgcggatgttgcagcgtggtatcgcgtttggcgaagccgttttcgtccagttcataagtccaggaggatttatcgtacttgcgtttttccgcgtcgtagccggtgaacaggccatcttcaaagccgtaatcctcacgcacgatcaggctggcgttggtataggcttcggtgtattcgcggttgaatttttcattgttcagcaggtacagcaatacgccactcaggaaagcaatgtcagtaccggaacgaataggggcatagtagtcagctaccgccgccgtacgcgtaaagcgaggatcgatcacaatcagcttcgcgccgttgtgaattttggcttccatcgcccagcggaacccgaccgggtgagcttcagcggcgttaccgcccatcaccacgacgaggttggcgttcttgatgtcgacccagtggttggtcatcgcaccgcgaccaaatgttggagcaagacttgctaccgttggtccgtgtcagacacgcgcctggttgtcgaccgcgagcatacccagcgcgcgggagaatttttgcgttaaatagccggtttcgttactgctcgcggaagcacacagcatcccggtggagagccagcggttaacagtcacgccttcggcgttttgcgcaatgtagttagcatcgcggtcttctttcatcagtttggcgatgcgatcaaacgcctcttcccaactgatttgctgccatttatcagaacctggcgcacggtattccggaaacttcagacggctttcggagtggatgaaatccaccaggccagcgcctttcggacaaagtgcaccgcggttgaccgggtgatccggatcgccttcgatatggaagatagatgctttggcgttttttgctccgtcaccgaggctgtacatcaacagcccacagcctacggaacaataggtgcaggtattacgggtttcgcgggtgcgcagcagtttatactgccgggtttccgcgagtgctacgctgggtgcaaaacccagtgccgctgccgtggtgcctgccataccgccagcgcagatcttaaagaactgccttctgctgacctgcatggattgctccttgtttcgacattgtcacgtcccatttacattcgcttgctgcgtgtgcagggagtgggagttatttttctttgcggaaggggccgcaaaggtccagaattggctcaatttccctccatccaggaagggtttgtaacagaataccataatgttggtgtgtgtgttcttatctggttaagagaaagtgaaaaaaacacagcgaaaagaaatcgaaaatgtgacaaatatcacaggtgttcgtcaaattgagttatggcggcgtgatgatttacaacacccacggttagatgaggtcgcggaagaagttcccgttgcgctggtctacaacggcattagccatgtggtgatgatggcgagccccaaagaccttgagtactttgcgctcggttttagcctttccgaggggattatcgaaagtccgcgcgatatcttcggcatggatgtcgttccttcctgtaatggtcttgaagtacaaattgagctttccagccgccgctttatggggttgaaggagcgccgccgggcgctggcgggacgtacgggctgtggcgtatgcggcgtggagcaacttaatgacatcggaaaaccggtgcagccgctaccgttcacccagacgtttgatctcaacaaactggatgatgcattacgtcatctcaacgattttcagccagtggggcaactgactggttgtactcacgccgctgcctggatgttgccatctggcgaactggtcggcgggcatgaagacgtgggtcgccatgtggcgctggacaaactgttaggccgccggagtcaagaaggggaaagctggcagcaaggtgcggtactggtttccagtcgtgccagttatgaaatggtgcaaaagagcgcgatgtgcggcgtagagattttgtttgcggtgtctgccgcgaccacgcttgctgtagaagtggctgagcgctgtaatctgacactggtaggtttttgtaaaccgggtcgggcaacggtttatacccatccgcagcgtttgagcaattaattaaaataagtcctgcgaaatatattaaattgcaggacttattcatttcgtgaattttattattttatttataaacaaaatgcgtgtagtggcgttttcttttttcatttattatgttcactctcttatctatatatttataaggcaattaaatgaaaaggaatttattatcttccgctattatagtcgccatcatgtccctcggtctgacgggttgtgatgataaaaaagccgaaacagaaacgctcccgcctgccaatagtcaacctgccgcaccagctcctgaagcgaaacctactgaagctcccgttgcaaaagcagaagctaaacctgaaacacctgcgcaaccggtggtcgatgaacaagcggttttcgacgaaaaaatggatgtctatatcaagtgctacaacaagttacagatcccggtacagcgcagtctggcgcgttatgctgactggctgaaagattttaaacaggggcctaccggtgaagagcgtactgtttatggcatctacggcattagtgaatccaacctcgctgagtgtgaaaaaggcgtaaaaagtgctgtggcgttaacgcctgcgctgcaaccaattgatggcgtggcggtgagttatatcgatgctgccgtggcgttgggtaataccattaacgaaatggataaatattacacccaggaaaattataaagacgatgcgtttgcgaaagggaaaacgctgcaccagacattcttaaaaaatctggaagcctttgaacctgtagccgaatcttatcatgcggcgattcaggaaattaatgataagcgtcagcttgcggaactgaaaaatattgaagaaagagaagggaaaacattccactactactctctggcagtcatgattagtgcgaaacaaattaataacctgataagccaagataagtttgatgcagaagcggcaatgaagaaagtgtctgaactggaaacgctagtggcgcaggccaaagaagcggataaaggcggcatgaatttcagctttattaatagcgcaggccagtatcaactcgaggctaaaaaatacgttcgccgcatcagagataaagtcccgtactctgactgggataaagagcaacttcaggacgcaaacagtagctggatggtcgaagactctttcccgagagcattacgcgagtacaacgaaatggttgatgactataatagcctgcgttaaacgtttttgatgataaatgcagtgtcggatgcggcgcatccgacacagttcaccccttgtgaagtaactccataaatgcctcatatcctgttaacccggcaataatctccgccggatgctgacacaatatgcttgccagatagctaaatatttttagctcatgacgcgcatcggcggcggcgcaggcgatcaagacatggttaatgacttcgttattcacctcaactggttgggcgagggtaataaaaaatccacgaaaacgtcgctcctgttcgctccagcaatgtgggatggcgaggcgattaacaatcaggttttcaccttcgccttcgcgggcgatgatgcgttgtgcttcatcggcggtaatatggtgttgtgcgactaattgcgcacaaatttgccgggtaatatgttgccagctttcaccgcgtacattgctataatgaaaacttccgggggcagagaaaaaacgctccggctgttggcgaataaatgccgtcgccagaaaatgttttatttgttcgataccggcagccgtaatgatattttttacggtgatgtaattatttaccgcgtcatccagtaaataatggctgttgttaatgatcaataacggctcaatctcttcgcgaatggcaacaagttcgcttaagctacgggcaataattacccgacaatttaaaacatcgcgctcaatggcgagctgattaatagtggcaatcgcgttctggtcgctgagcaaaatgatcggctggcgttcgttttgatgccgctccagcgcacaggcaaaatacaaaccgatcagatcgctgtcgaaaaggggaatatcgagctgttcacgcagtagcgtaataaagtgcagactcatatcaaaggccgcaggccaggcggctttcaggttattcatgctgctctggcggtgctcagcaatccacactggtgcggcaaggcaacgtaataaatgcccggtaatattctcaaccagctgcgcatcaataatattcaaactcgcgatgcccggcaccctttgcagcaacccctgcacattatcggcactaattacctgcgcttgctgatgctgtttctctatcaaacccgtcagggttcttacagcgttatcaccaagaaacagaccgctatgttcaacgatttgttttatctcgtcaccgggatattgcggccactcatcggtcagttgattacgcagggcgtaaatcgccagaatcaggctggagagataatcaccctgcatgagcggccagcggtgttggttgtcgcaggccgtggataaatgctgaaggttgtctcgtgttatgcccgccagcggaattaaaaacggatctttgcgcagcaagttcgccagcaagataacgcgtttctcttctgtctcatcaatgaaatggcccaaaccagggcggctggccaggcaacaagtgcgttcataacgctgttttaaccggggcagacgctctgctacccacgtttctggcaaattaagcgcgctggcgagttgcgcacggggagtgaaagtattcagtaataacagcgccagcagccgatcgtcgttatcgtgcttttgcagcaactgaaaaaagctgcggcgctcgaagatttccagctgatagcccgcactgccactggcgaaaatgcgggctttgccgttaagggtgaagttgagatagtcaatatcacgcaggatggtcctgccactaacgccagtctgttgcgccagctcgccaggcgtgcgcggctgttgctccagcagatcgacaatctttaactggcgttcgtttagcattaatccacctgacggaactggctaaacgcgttgactttctccgcagttaaggtcgtcagaaaaccccgtatcagcgtgagcagagcttcgtaatcggctttactaatcataccgctgttggcgtgcagataacgagttggcagacacagcgcgacaaccggacgcccgccgcccatcacgttgtagcgcccgccatccgtcgcaccggttttcatggtggaaaattgcagcggtaaatcgttatgtgcggcacagctttttaacgctgctaccagtttctggttggggaagtagcgcttgtcaaacagcatcagccccggcccctggcccagtttcagcgggtatttaatgttatcaatgcccggaacatcgcccgctacggcggtatccaacacgatcacgacgtccggtttaatgtgttccgcgctggtttgcgccccgcgtagcccaacttcttcttccacactgccaacgccatacagcgtaatttcgggattattcaccgtctgcaatagttcagccatcattgcgcagccgatgcggttatccaacgccttgccgaccactttatcttcgccccagcaggcaaaattggcttccgggctaataaaattaccaatttccacgccgcgcttttccacctcttcgcgactgttcgcgccaatatcaatgaacatctcatcaaaactcagcggttgttgcttttgcttttccgttaacgcatgaggcgcgacggaaccaatcacaccagggattttcactcccttgtgtgtgcgtatggttacccggtggttgagcatgctctgattccaccagccgccaatggtggtaaaacgcagaaaaccgctctcgtcgatgtgggtgaccataaagccgacttcatccatatgtccgacaacggcaacttttggacctttattccccttacgggcaacaaagctgcccagaccatcgaaggtgatttcattcacgcaaggttccagcgtgtttatcagaatgtcgcgaacttcctgttcatcgccgctgacggcgctggcttcgcacaactgttgcagtaactcaatgttcatggacaagctcctgttgcgcggctttcgctttgcggcgtaaccacaatcctttcaggacgataatgaaactaatgttcagcgcgaggccaatcgccagcaccagataaaagctacccaccgggctcatcaggccgatcagcgggtcaaagatacccaaaccaggtgccagacgtttgattccgaaagcgatcaccagcacgccggtaatgccgcccgccagcgtattggcggtaatcatcggcaacggagctgccagagcgtaaggaatagccggttcggttgcgactgtggcaccgaccacaatggcactactggcagcctctttttcctgtcgggtaaacagtttgggcgcaatgaacgtcgcaagacccgccgcgacgggcggcatcagcgcgacaacgccgacgatggcgtaccagtcataaatgtgtttttccagcagactgaagcagaagaaccaggcggttttattgatggggccgcccatatcgaacgccagcatcgcaccgaccagaaacgctgccgcaaacttcatacttggaggaatggtattcaggaagtggagcagcccgcccatgaggtcggacatcaccggcccgataacgtagtaagtgagcacgccgaaaaccagcagagtaacgaacgggatcagcatactaccgagcagcggttgtaatgctttgccaaggcgcactttgcggaaccagaagacgaaatagccaatcgccagccccagcaccaccgcgccgaggaatcccgcaccgctctgggtgccgagcagcgctttgtcgttcgccagatagcaaaccagaaacgccggagcgaaagccggtttatcggcaatgctgctggcaatataagcgcccatgatggggatcataaaggtgaagccaaggtaaccgatggattcaactacccaggtaaagctcggcgcgcctttgctcatatcggtatacggcaaaccgaactgcaccagcatgttggcaagcgccaccaggataccaccgccgatgacaaacggcagcgccgcagagacgcccgccatcaggtggctcatcacgctaccgctttgcacttcctgtttgccaagcttcacgccgctatctgcggcaaaaagctggctgtttgtcggtaattcgctgaaaatctggtcgatatttttcaacgcctgggagatggcaatctcataaactttcttcccggcaaaccgcgcgcgatcatcaccgctcaggccacgcccggtagcgagaatgacgtaatcggcagcggcaatctcttcgctggataagcggttttcaacgccactggacccttgagtttccacttttatggtatgaccgagagaacgggctttctgttccagggcttccgccaccatgtaggtgtgagcgatcccggcggggcagttggtgatcgcgacaatacgtaaggaactctccatcgccacttccttaactgctgagggtttgatttaacaaggcaagcgcctggtcggtatcgccctgttgcagttgatgaataaattccttgtgaataattttgcgacacagtgtgccgatgattttgacctgatcctcttcgccgctttgcggcacgccgaggcagatccagcaattgacgtcttcgccatcgctggctttccagtcaatagcctgcgctttgcgggcgaataatacgaacggttgtttaacgcaggcgcttttaccgtgcggcacggcgacaccggaaccaaatccagtagagtgcattttttcgcgcagcagcagggtttgcaggaactggtgactgtcggtgataaaaccgttttgtaacgctattgtcgccaactgcttcagaacggaataagcgccattgccctgaatattcaggtcaatacagcttgcagtaagagctgccattaatcggactccataaaatatattttaatcaattgtaatggtggagcgattaagtgatgagaggcgatatgtcggtaaacaatgacaatttgagacagagtgaaaggtcagatttgcggagtaatgcacataatggttatttaaataaaccacatgaatcattaatgggttattcattatttttgtgatttactcacaatgtatcagggaaatataacttaccgggagatgtaatatgtttaatttttcaaatcgaaatttaaaatattgtgccggaggcatctctggcacattgggcaattacggcaggtaaaacacttcttgcagctcgctactcaccgggctgttatccgggttagcgggcataacatcggtcatatatttccaccaacgttggcagacatcagtgctggcaaccgcattccagcgttcttcagattcaatctctaccatggcaaacagcagattacgcgctttgtcgagatagatggcgtagttatgcgcaccgtgagatttcagcactgcttccagttctggccagatgggattatgccgacgctgatactcttcgtgggcgtcggggtttacctgcatgacaaaggctttgcggatcatgtttgctccttacagcgccagcgcactggcgagtggcgtaacgccgaaacgcttgccgagcgctatcaactcttcacggctgatggtctgtttcatgccgcccatgctataaaccttcactaatacttgtgcacttttttctgcggtgtcgattaaaccgaaggtttcatccagcgtcggtccgctgccgaagacgccgtggaagggccacaacaccaggctatgtttttgcatctcttgtgcggtcgcctggccgatttcgtccgtgccgggcaccatccacggcaaaatgccaacgccatccgggaataccaccagacactcggtgctgccttcccccagttggcgagtgaagaccgcggtgtcgttttcaagtacataggtgagggcgatcaggttggtggcgtggcagtgcatgatcacccgatctttgccgttggtggctttaatgcgctcgcagtgggaaaggaagtgagccggaagttcggaagtggggacggcttcgttggttaacccccaaagaatgtggtagcccgcgccgtcgctgtcgacttttacgatgcctaagttagccgcaggatcaagctggacgttacggaagaatttgccgctgccggtgacaataaacggtgtatttgccagtaaaggcatgggctggctgagcgggatatagcgcggttgttggtggaaattgtcgtgatatggtgcgatatcggcgtcatccaggcgtagcgtcaggttgccgccgttgcgctcatcccagcctttcagccaggcgtcggtggtggctttgatcattccctggacaaaccaggactgagtaatgttttgcatgttctgtgttcctgtaaattcggtgttgtcggatgcacgacccgtaggccggataaggcgctcgcgccgcatccggcaatcaatgcctgatgcgacgctgtcgcgtcttatcaggcctacaactattgccgacctgtaggcctgataaggcacttgtgccgcatccggcaatcaatgcctgatgcgacgctgtcgcgtcttatcaggcctacaactgttgccgacctgtaggccggataaggcacttgtgccgcatccggcaatcaatgcctgatgcgacgctgtcgcgtcttatcaggcctacaactattgccgacctgtaggccggataaggcacttgtgccgcatccggcaatcaatgcctgatgcgacgctgtcgcgtcttatcaggcctacaactgttgccgacccgtaggccggataaggcgctcgcgccgcatccggcagtgtttacccgcggcgactcaaaatttctttctcataagcccgcacgctctccagccattcgctacctgctggcgtatcgtgacgttggcaatacatttcccagaccgcctgccacggcaagcttttctgctcttccagcagtgccagacgcgcagtgtaatcgcccgccgcttccagcttgcgcagctcagcggtaggttccagcaacgcacgcagcagggcttttttcatattgcgtgtaccaatgacccacgcggcaatgcggttgatagaggcatcgaagaagtcaaggccgatatgcacccggtcaaacagatcgtgacgcacaatctcactggcaattgcctgggtttcatcatccagcagcactacgtgatcgctgtcccagcgaaccggacggctgacgtgcagcagcaactgcggcacatacagcatggcggcggaaatcttgtcggaaatcacttcagtcgggtggaagtgcccggcgtccaggcacagcgcagtctggcggctggtggcataccccatgtaaaactcattggagccaaccgtgtagctctctgcgccaatgccaaacaatttgctctcaacggcgtcgatatggtgcgcagggtttagcttctcgctgatcacctcatccagtgctgccagcagacgctgacgcggggcgagacggtcaacggtgatatctttcataccatccgggatccagatgttcatcacgcttggtgtgccgagttgctcgccaaaataggcgctaacgcgacggctggctttgcagtgatcaatccagaactggcgaatgctgtcgtcggcatgggaaagcgtaaagccatcggcgcttagcggatggctaaagcaggaggggttaaaatccagaccgagctgattggctttcgcccattcaacccagtttttgaagtgctctggtttgatctggtcgcggctgactggcgtatcactttccagatagatggcatgtaaattaagccgtttcggccccggaatcagccgcatagcctgttccagatcggcacgtagctcactggcattacgcgctttgcccggataattgcctgtggcctgaatccccccggtcaggctaccttccgggttttcaaaaccggaaacatcatcgccctgccagcagtgcatactaacgggtaaacgatcaagttggcgcagcgcctcctcgacatcaatccccaccgccgcgaaacgctgtttcgctagctcccaggcctgttccagttgagtggtcatgcgcaaagctcctttgtctgtcgtgtagagtgaatctgcgccacatagtgggcaatttcactgtcaggattaggggtaaaggtggtcagattcgcggtggtgctgacgacctgacggaaatcatccacattgttgagttcatccagcgtcattaactggatgccgatattgccgagcgtgctggcttcaacaggcccggcgatcacccgaataccgcaggcatcggcgcatagctggttgagcagcgtgttctggcagcctccgccgacaatatgcagttggctgaaatcttcaccgcgcagctgcgccagctcatgcaacacatcggcatacagcagcgccagactgtcgaaaatgcagcgcgccagttcagcatcactttccgggatcggttgcgccgtttcccgacacgcagcctgaatttcgctgcacatcgtctcaggattaataaagcgatcgtcattgggattgataatgaagcggcaagccggaagtgcctgtgtcgcggagataagcgccggaagatcgttgatttgctgctcctgaagcactcgctgaagcagccataagcccataatatttttcagcacccgatagcgaccttccgccccgccttcattggtgatgttggctgccagtgccgtgtcattggtaaatggcgtctggctttcgaagcccatcaaactccaggtgccagaagagagataagcagcacgactgccgtttaacgggctggcgataaccgcgctggcggtatcatggctggcaacggcgaccactggaatctcattaccctgcgggcaaatccagtgacctatgacattacccggatgcgtcgggcgaccaaaccaggctttgttggccccgctccacgccagtaggctctcgtcccagtcgtcgctattgatattgaccagttgcgtggtcgtggcgttggtatattcccagttcatcttgccggtcaggcgataactgaagtaatccggcatcagcagagcgtgagcaatgtgtggaataagttcaggttgttgctccgtcagcgcacgcaactgataaagcgtattgaagggcagaaactggatgccgctacgttgataaatatcgcgtttgccgagttgttgttgtgcctgcgccattaggccattggtgcggctatcgcgataagcaacgggcaggcccacacgctgaccctgttggtcgagcagcacaaagtccacgccccaggtatcaatcccaatgctatcgatacgaatcccttcctcgcacaccttgtttaatccaaggcgaatggcactttcaaggctatccacatcccaggtgacatagccgttctgactatgcagcccattgttaaaacgatggatttcgcgcagcgtcaggctgcggcattcacgctcgtaacgcgccagcatcacgcgcccactggatgcgccgagatcgacggcgacacaattgcgaaaggtcataatgtgatcctgctgaatttcattacgaccagtctaaaaagcgcctgaattcgcgaccttctcgttactgacaggaaaatgggccattggcaaccagggaaagatgaacgtgatgatgttcacaatttgctgaattgtggtgatgtgatgctcaccgcatttcctgaaaattcacgctgtatcttgaaaaatcgacgttttttacgtggttttccgtcgaaaatttaaggtaagaacctgacctcgtgattactatttcgccgtgttgacgacatcaggaggccagtatgaccgtattacatagtgtggatttttttccgtctggtaacgcgtccgtggcgatagaaccccggctcccgcaggcggattttcctgaacatcatcatgattttcatgaaattgtgattgtcgaacatggcacgggtattcatgtgtttaatgggcagccctataccatcaccggtggcacggtctgtttcgtacgcgatcatgatcggcatctgtatgaacataccgataatctgtgtctgaccaatgtgctgtatcgcagcccggatcgatttcagtttctcgccgggctgaatcagttgctgccacaagagctggatgggcagtatccgtctcactggcgcgttaaccacagcgtattgcagcaggtgcgacagctggttgcacagatggaacagcaggaaggggaaaatgatttacccagcaccgccagtcgcgagatcttgtttatgcaattactgctcttgctgcgtaaaagcagtttgcaggagaacctggaaaacagcgcaagtcgtctcaacttgcttctggcctggctggaggaccattttgccgatgaggtgaattgggatgccgtggcggatcaattttctcttagtctgcgtacgctacatcggcagcttaagcagcaaacgggactgacgcctcagcgatacctgaaccgcctgcgactgatgaaagcccgacatctgctacgccacagcgaggccagcgttactgacatcgcctatcgctgtggattcagcgacagtaaccactttagcacgctttttcgccgagagtttaactggagtccgcgtgatattcgccagggacgggatggctttctgcaataacgcgaatcttctcaacgtatttgtacgccatattgcgaataatcaacttcgttctctggccgaggtagccacggtggcgcatcagttaaaacttctcaaagatgatttttttgccagcgaccagcaggcagtcgctgtggctgaccgttatccgcaagatgtctttgctgaacatacacatgatttttgtgagctggtgattgtctggcgcggtaatggcctgcatgtactcaacgatcgcccttatcgcattacccgtggcgatctcttttacattcatgctgacgataaacactcctacgcttccgttaacgatctggttttgcagaatattatttattgcccggagcgtctgaagctgaatcttgactggcagggggcgattccgggatttaacgccagcgcagggcaaccacactggcgcttaggtagcatggggatggcgcaggcgcggcaggttatcggtcagcttgagcatgaaagtagtcagcatgtgccgtttgctaacgaaatggctgagttgctgttcgggcagttggtgatgttgctgaatcgccatcgttacaccagtgatagcttgccgccaacatccagcgaaacgttgctggataagctgattacccggctggcggctagcctgaaaagtccctttgcgctggataaattttgtgatgaggcaagctgcagtgagcgcgttttgcgtcagcaatttcgccagcagactggaatgaccatcaatcaatatctgcgacaggtcagagtgtgtcatgcgcaatatcttctccagcatagccgcctgttaatcagtgatattagcaccgaatgtggctttgaagatagtaactattttagcgtggtgtttacccgggaaaccgggatgacgcccagccagtggcgtcatctcaatagccagaaagattaattcgccatgccgatgccgacgatgttagcggcgacaataatcaccacacaaccgaggctcaacaccgttaccggacggcgtcctgcattgttccactctttcagcaccagcccgacgataccgccgcacaatacatagaaactcatatgcagcatccaactgatgtagtcatactgcgccggaatgcgggcgtggccccaggcatagaaaaagaattgcagataccacatcaacccgcccagtgtgctgagtaacacattgtgaatgatcaggctttttgccaggctgaagtcggcttttaggctcaaatccttcacttttgccagacgaataaaacagaaaccgaggttaatgatcgcgccgccgcccatgatgacaacatagcttggcagagcgacatacagtggatcgacgccaagtgcggcagcggcttcatgcatcggttttgcggcgttcatcgcaaaggacatcccggcagagaaaatgccgcacatcaccgccagcaccagcccttttttcagattgaactcttcggctttaatgcccatcttgcgctctttcaactgcccggcgcgagttacaatccctacgccaatcagcgccaccagaacgccgagcaacgtcatgcgtccgccttcggtgctaatcaacacatcgaaattgccgttgataattggcgtcatcagcgtaccgacaatcaacgtaatgccaatggcgatgccaattcccatgctcatgccgagataacgcatggtcaggccgtagttgatattaccgatcccccacatagcgccgaacagaaaaacaggcagtcgcgtagagagactaaagctgctgtaatacgcccagaaattcggtagtaacagggcgctgatggcccacggcagaataatccagctaacaatcccaccgacactccacatggtttcccaactccatttttttacttttttgaacggagcgtaaaaacaggctgcactggccgcgccgatcaaatgccaaaatatccccatcgtaatcgcgttactcatcttcttatcctcatcatttttcgtcgcgtcacatctccgacgagatgagtgtaaaaatcgtgctgtcgattaacctttcgcctgttgccgccgttgtcgatttactggcaatcacggcattaagtgggtgatttgcttcacatctcgggcattttcctgcaaaaccatacccttacgaaaagtacggcattgataatcattttcaatatcatttaattaactataatgaaccaactgcttacgcggcattaacaatcggccgcccgacaatactggagatgaatatgagctataccctgccatccctgccgtatgcttacgatgccctggaaccgcacttcgataagcagaccatggaaatccaccacaccaaacaccatcagacctacgtaaacaacgccaacgcggcgctggaaagcctgccagaatttgccaacctgccggttgaagagctgatcaccaaactggaccagctgccagcagacaagaaaaccgtactgcgcaacaacgctggcggtcacgctaaccacagcctgttctggaaaggtctgaaaaaaggcaccaccctgcagggtgacctgaaagcggctatcgaacgtgacttcggctccgttgataacttcaaagcagaatttgaaaaagcggcagcttcccgctttggttccggctgggcatggctggtgctgaaaggcgataaactggcggtggtttctactgctaaccaggattctccgctgatgggtgaagctatttctggcgcttccggcttcccgattatgggcctggatgtgtgggaacatgcttactacctgaaattccagaaccgccgtccggactacattaaagagttctggaacgtggtgaactgggacgaagcagcggcacgttttgcggcgaaaaaataatcatttgccgcctgctgcaatgaggcgtataggccgcatatcagcttaaaaaatgaaccatcgccaacggcggtggtttttttgtgatcaatttcaaaataaaaacaatgatccgataaaaataaaacagcgtttcaattgatgtggttttgatcacttttattgattaaatgaatgtctatcttcgtttccatcaacactgatgctccattgaggaattacgcatcagcccttaaaaatatgccgacaggtgatggaaatgcagataaagcgcagcattgagaaaatcccggggggggatgatgctcgtcccgctattccttggcgcactgtgccacaccttcagcccgggggcggggaaatattttggaagtttcaccaacgggatgattaccggtacggtgcccattctggcggtgtggtttttttgcatgggggcgagtataaaattaagcgcgacgggaacggtactgcgtaaatccggtacgctggtggtaactaaaattgccgtcgcgtgggtggttgcggcaattgccagccgtattattccggaacatggtgttgaagttggattctttgccggacttagtacgctggcgctggtggcggcgatggatatgaccaatggcggactttacgcttccatcatgcagcagtacggcacaaaagaagaagctggggcatttgtgttgatgagcttggagtccgggccgctcatgacgatgattattctgggcactgccgggattgccagctttgaaccgcatgttttcgtcggcgcagtattaccgttcctggtgggctttgccctggggaaccttgaccctgaattgcgagaatttttcagcaaagcggtgcaaacgctgattccattctttgccttcgcgctgggcaataccattgatttgactgtgattgcccagactggtttgctggggatcctgttgggtgtggcagtaattatcgtgaccggtattccgttgattatcgccgataaattgattggcggtggcgatggcactgccggaattgccgcttccagttccgcaggggccgcggtagcgacacctgtgctgattgcagaaatggtgcctgcgtttaaaccgatggctccggcagcaactagcctggtagcgacggcggtcattgtgactagcattctggtgccaattcttacctctatctggagtcgtaaagtcaaagccagagcagcgaaaatcgaaattttaggtacggtgaaataaacctgcttccttaatccccacagccggatgaactaacgttcgtccggtttgctattgagttcctgcctggatacttaccgcgaaaacagcacgcctgacataaaataaatatggtctaatggggaaatttctcgtggagagggaacagatgcgatatccggttgatgtatacacaggcaagattcaggcttatcccgaaggcaaacccagcgcaattgctaaaatccaggttgatggtgagttgatgctgacggagctggggctggaaggtgacgagcaggcggagaaaaaggttcacggcgggccagacagagcgctgtgtcattatcctcgtgagcattatctctactgggcgcgggaatttccggaacaggcggagttgtttgttgcgcctgcgtttggtgaaaacctcagtaccgacggcctgacggaaagtaatgtttatatgggcgatattttccgctggggagaggcattaattcaggtcagccagccgcgcagcccttgctataaactcaattaccattttgatatcagcgatatagcgcagttgatgcaaaacacaggtaaggtggggtggttgtatagcgtgatagcgccagggaaagtgtctgcggacgcgccgctggagttggtttcccgtgtcagcgatgtgaccgtgcaggaggctgccgccatcgcatggcatatgccgtttgatgacgatcaatatcaccgtttactctccgctgccgggttaagcaaaagctggacgcggacgatgcaaaagcgccgactgagcggcaagatcgaagatttttcccgccggttgtggggaaaataacccccggagtgtaggcctgataagacgctatcagcgtcgcatcaggcatcctgctcaaatgccggatgcggcgtaaacgccttatcctgcctgcaaatgcgaagtttaactccgcttatacagcggcaaccaaatcaccagccgtaaaccgcccagcgggctgtcttctgccttcacccagccacgatgctgctgaatggcggtttcaacaatcgccagccccaaacctgtaccgccagattcacgatcgcgtgcttcatcggtacgatagaacggacggaaaatctgttcgcgatcttccgggctaacgccaggaccatcgtcgtccaccgtaatggtgataccgtctttatctaccgcaaagcccacttcaatcttcgtatgggaataacgcagagcattacgaacaatgttttccagcgcactttccagggcgttcggattgccgtacagcggccacggcccaggcgggaagttaactgtcaagctcttgcccatttgctcggcttcgaacgccgcgttatccagcacttcactccacaactggttggctttgatggtttcgctaaccagcgcgtttttttgctgattacgactcatcaccaacagatcgttgatcatgctgtccagacgttgcgcttcggtttcaatacgctccagttccttgctttcaccgctacgacggcgcagtaacgccgtacccagttgcagacgcgtcagcggggtgcgcagctcgtgagagatatcagaaagcagacgctgctgagaggtcatcatgcgctccagcgcggtgaccatctggttaaaactggcacctgcggcaaggaattcctgtggccccgcttccagttccgggtgctggcgtaagtttccctgggcaacttcatcggcagcgtttttcagcttacgcgccggttttgccagactccaggccaaccacaacagcagcggcgtactgaccaacatggtgacaatcagcagtaatagcgggcggtcaaacagtaagttaatgaaatcggattgagaactgctggccggacgaatcagataaagttggtaattatcttcgccatcacgcacggagaacggaccgaccagttccacgcggccatactttttcttctgcggatgatcggcgttatcggcctgaccaataaagttacgaatgatctgcatttcgctgcgttcagcgccgatcacgcggccttcggtggtcaccaataacaaacgctgtcctggcggtgcccacttatcaatcgcccggaacagacgccgccaccacattaaatcgttgggcggatcgttcgccagctccgcttcgacatgctgctcaatcatcagcccctgacgctgttcgctatccagaagctcggtcatctggcgactatcgagcttgggtaacatcaaaaccaacatcaacaccagcgccagcgtcagccagaagatggcgaagatgcgcgcggttaagctgcctatcatgaagcagaaaccatcagatattagctcaactagcagaaaccatcagatagccgcgaccacgcaaggttttaaaccacgggtgaccatctttacgatccggcagtttacgacgcaggttggaaatgtgcatatcaatagcgcggtcgaaaggcgtcaggcgtttgcccaacacttcctggcttaaatgttcacgggaaaccacctgacccagatgctgtgccagcaaatagagcagggtaaactcagtaccggttaactccagcgtttgcccgtcgaagctggcttcctgacggcctggattcagcactaaggcatcaacttccagtgtcggactaccgttgtcgttgttttgctgttgctcgctccagtggctacggcgcaggatcgcgcgaatacgtgccaccagctcacgatcattaaacggtttcgggagatagtcatctgcgcccagctcaaggccgagaacgcgatcaagttcactgccgcgcgccgtcaacataatgacaggcgtctggtgtgtctggcgaagtgcttttaatgtgtcgataccatttttcttcggcatcattacgtcaagcaaaagtaaatcaatgctgtcgtccagaagatcaagcgcctgttccccatcgtgggcaacaatcacgttgaagccttccatctcgagcagctcctttaatagggaagtcagctctcggtcatcatcaactaacaggattttattcattgtttaaatacctccgaggcagaaattacgtcatcagacgtcgctaatccatgactttacgttgttttacaccccctgacgcatgtttgcagcctgaatcgtaaactctctatcgttgaatcgcgacagaaagattttgggagcaaatgatgcgcatagttaccgctgccgtcatggccagtacgctggcagtcagtagtttaagccacgctgctgaagtcggtagtggcgataactggcatccgggtgaagaacttacgcagcgcagtacgcagagccatatgttcgacggcataagtttaaccgaacatcagcgtcagcagatgcgagatcttatgcaacaggcccggcacgaacagcctcctgttaatgttagcgaactggagacaatgcatcgccttgtcaccgcagaaaattttgatgaaaacgctgtgcgcgcacaggcagaaaaaatggcgaatgagcaaattgctcgtcaggttgagatggcaaaagtccgcaaccaaatgtatcgcctgttaacgccggagcagcaagcggttttaaacgagaaacatcaacaacgaatggagcagttgcgtgacgtgacgcaatggcaaaaaagtagtagcttgaagctattgagtagtagcaacagtcgttcccagtaataaaccctgttttccttgccatagacaccatccctgtcttcccccacatgctgtgggggtttttttatcctcaatttgcctgctgcttaatgcattgcagatgatttgcttccgttatactagcgtcagttgatagcgggagtatttatgaatcaatcttatggacggctggtcagtcgggcggcgattgctgcgacggcgatggctagcctgctattgctgattaaaatttttgcatggtggtataccgggagcgtgagtattctcgccgcgctggtggatagcctggtggatatcggcgcgagcttgacgaatttattggtggtgcgatattccctgcaacctgccgacgataatcacagctttggtcacggtaaagctgagtccctcgcggcgctggcgcaaagtatgtttatctccggtagcgcactattcctgtttttgacgggtattcaacatctgatatctccaacaccgatgacagatccaggcgtcggggttatcgtgacaattgtggcgctaatttgtacgattatccttgtcagctttcagcgttgggtggtgcggcggacgcaaagccaggcggtgcgggctgatatgctacattaccagtctgatgttatgatgaacggcgcaattctgctggcgctggggttgtcctggtacggctggcatcgcgccgatgctctgtttgcattgggaatcggcatctatattttatatagcgcgttacgcatgggatatgaggcggtacagagtttactggatcgcgcattgcctgatgaggaacggcaagaaattattgatatcgtgacttcctggccgggtgttagcggcgctcacgatcttcgcacgcggcagagtgggccgacccgctttattcagattcatttggaaatggaagactctctgcctttggttcaggcacatatggtggcggatcaggtagagcaggctattttacggcgttttccgggaagcgatgtaattatccatcaggacccctgttccgtcgtacccagggagggtaaacggtctatgcttagttaatcagtataaaagagagccagacccgcattttgtgtataaaataccgccatttggcctgacctgaatcaattcagcaggaagtgattgttatactatttgcacattcgttggatcacttcgatgtgcaagaagacttccggcaacagatttcattttgcattccaaagttcagaggtagtcatgattaagaaaatcggtgtgttgacaagcggcggtgatgcgccaggcatgaacgccgcaattcgcggggttgttcgttctgcgctgacagaaggtctggaagtaatgggtatttatgacggctatctgggtctgtatgaagaccgtatggtacagctagaccgttacagcgtgtctgacatgatcaaccgtggcggtacgttcctcggttctgcgcgtttcccggaattccgcgacgagaacatccgcgccgtggctatcgaaaacctgaaaaaacgtggtatcgacgcgctggtggttatcggcggtgacggttcctacatgggtgcaatgcgtctgaccgaaatgggcttcccgtgcatcggtctgccgggcactatcgacaacgacatcaaaggcactgactacactatcggtttcttcactgcgctgagcaccgttgtagaagcgatcgaccgtctgcgtgacacctcttcttctcaccagcgtatttccgtggtggaagtgatgggccgttattgtggagatctgacgttggctgcggccattgccggtggctgtgaattcgttgtggttccggaagttgaattcagccgtgaagacctggtaaacgaaatcaaagcgggtatcgcgaaaggtaaaaaacacgcgatcgtggcgattaccgaacatatgtgtgatgttgacgaactggcgcatttcatcgagaaagaaaccggtcgtgaaacccgcgcaactgtgctgggccacatccagcgcggtggttctccggtgccttacgaccgtattctggcttcccgtatgggcgcttacgctatcgatctgctgctggcaggttacggcggtcgttgtgtaggtatccagaacgaacagctggttcaccacgacatcatcgacgctatcgaaaacatgaagcgtccgttcaaaggtgactggctggactgcgcgaaaaaactgtattaatgatttcggaaaaaggcagattcctttaccctgaaaccgatgacagaagcaaaaatgcctgatgcgcttcgcttatcaggcctacatgaattctgcaatttattgaatttgcaaacttttgtaggccggataaggcgttcgcgccgcatccggcatggacaaagcgcactttgtcagcaatatgaggcggatttcttccgcctttttaatccctcaacatatacccgcaagttatagccaatctttttttattctttaatgtttggttaaccttctggcacgctttgctcatcacaacacaacataagagagtcgggcgatgaacaagtggggcgtagggttaacatttttgctggcggcaaccagcgttatggcaaaggatattcagcttcttaacgttagttatgatccaacgcgcgaattgtacgaacagtacaacaaggcattcagcgcccactggaaacagcaaactggtgataacgtggtgattcgtcagagtcacggtggcagtggtaaacaagcgacgagcgtaatcaacggtattgaagctgatgttgtcacgctggctctggcctatgacgtggacgcaattgcggaacgcgggcggattgataaagagtggatcaaacgtctgccggataactccgcaccgtacacttccaccattgttttcctggtacgtaagggaaatccgaagcagatccatgactggaacgatctgattaaaccgggtgttagcgtgatcacgcctaatccgaaaagctctggtggcgcgcgctggaactacctggcagcctggggctacgcgctgcatcacaacaacaacgatcaggcaaaagcacaggattttgttcgggcactgtataaaaacgtcgaagttctggattctggcgcgcgtggctccactaacacttttgtcgagcgcggaattggcgatgtactgattgcctgggaaaacgaagctctgctggcagcgaatgaactggggaaagataaattcgaaatcgtcacgccgagtgagtctatcctcgcagagccaaccgtgagcgtggtcgataaagtggtcgagaaaaaaggtactaaagaggtggcggaagcctacctgaaatatctctacagcccagaaggtcaggaaattgccgcgaaaaactactaccgtccgcgcgacgctgaggtggcgaaaaagtacgaaaatgcgtttccaaagctgaagttattcaccattgatgaagagttcggcggctggacgaaagcgcaaaaagagcattttgctaacggcggtacgttcgatcagatcagcaaacgctgatttccccaggataattatcaaacccggtggtttctcgcgaccgggttttttatttgtcacgattttgcgttacccttgcatctctttgaggtacagggaaaaaaagatgaaaaaagcgggtcttctttttttggtgatgatagttatcgccgttgtggctgccggtattggttactggaaattaaccggtgaagagagcgatacattacgtaagattgtccttgaggaatgtttgcccaatcagcagcaaaatcaaaatcctagcccatgtgcggaagtcaaacccaatgccggatacgtggttttaaaagatcttaatggcccactgcaatatctgttgatgccaacgtatcgtattaacggtactgaaagtcctttgttgaccgatcctagtacgccgaacttcttttggttggcttggcaggcgcgtgattttatgagcaaaaaatacggccagccggttcccgatcgcgcggtttctttggcgatcaactcccgcaccgggcgtacgcaaaaccattttcatattcatatctcttgtattcgtcctgatgtgcgcaaacagctggataacaatctggcgaacatcagcagccgctggttgccactgccaggtggtttgcgcgggcatgaatacctggcgcgtcgggtaacggaaagcgaactggtacaacgcagcccatttatgatgctggcagaagaagtacctgaggcgcgggaacatatgggacgctacgggctggcgatggtacggcagagtgataacagttttgtattgctggcgacacaacgaaatctactgacgcttaaccgtgctagtgccgaggaaattcaggatcatcagtgtgagattttgcgttaaggcgaagagttaaggaaagtaagtgccggatatgaaatccggcacctgtcagacttaagcctgtttagccgcttctgcagctttaacgattactgcgaaggcgtcagctttcagagaagcaccaccaaccagcgcgccgtcgatatccggctgagcaaacagttctgcagcgttagacgcgtttacagagccgccgtactgaatgatcacttgttcagcgatgttagcgtcaactttagcgatgtggtcacggatgaatttgtgaacagcctgtgcctgagccggagttgcagatttgccagtaccgattgcccatacaggttcgtaagcgataaccgcaccttcgaatgccgcagcaccctgagttttcagtaccgcgtcgatctgacgtgcgcaaacttcttcagttttgcccgcttcattttcagcttcggtttcaccgatgcacagaaccggagtcaggccctgctctttcagcaccgcgaattttttcgcgatcagttcgtcagattctttgtggtaagtacgacgttcagagtgaccgatgatgatgtactgtgcgccgatgtctttcagcatagcagcagaggtttcaccggtgaatgcgccggacaggttcaggtccacgttttgcgcacccagcatgatgtggctgccttcagcttcgcgcttcgccatatcgatatacatttccggtggtgcgattgcaaccgcacagccagcaacacctgccagctctttacgcaggttagaaaccagctcgtgaaccatgtggcggctgccgttcagtttccagttacccatcactaaaggatgtcgcattttaattctccacgcttataagcgaataaaggaagatggccgccccgcagggcagcaggtctgtgaaacagtatagagattcatcggcacaaaggctttgctttttgtcatttattcaaaccttcaaggctttcagatagcgccagcttaatcggttcaacagcgaaggtcagccccttttcgccgttgtccgcgacaacataacgcagtgcaccttctgtctcggtgtaataacgtttgtttttccccgccgttagtaggctctgcagttttttctggctttgtgttttggtcattaatggggtgagtgtgcggatcaccgctgccatgtattcctgagctttcgctttcgcggctttttgctctggcccctggatgggtagccaggtcatttgaatgcttttgatttttaaggtaccgcgctccagcgctgtagaagcatacaagttctcattaattttacttgcagcacgagtgagattggctttgtcgggactgctgtcgatggcacgaaattcgttcagtggcaggctgggattctggctgttaaagtcttctcgaaactggctgatggagagatcgaaagtaggggctccagccagcagataaggcgcggtcgttgccgtatctggtgtttgtgcatgcgcctctgttgtaacggttaatgcagaacataagagaaaaaacagcgtacaccctggcttcattgacagtaccttttgttatgactggctccgattaaaacgatatctgtcgcccttgtcaaaagggtagaatcctggaaaagacaaccatcaaggaacttacatgaccatacagcaatggttattcagttttaaagggcgtattggacgccgtgatttctggatttggataggcctgtggttcgcaggcatgctggtgcttttcagtctggcgggtaagaatctactcgatattcagaccgcggcgttttgccttgtgtgcttgctctggccaacagcggcagtaactgttaagcgcttgcatgatcgcgggcgttccggcgcatgggcatttctgatgattgtggcgtggatgctgctggcgggtaactgggcgattttaccgggtgtctggcaatgggcggtggggcgttttgtcccgacgttgattctggtgatgatgcttatcgatcttggtgcgtttgttggcacacaaggcgaaaataaatatggtaaagatactcaggatgtgaagtataaagccgacaataaaagtagtaattaacctttaatatatctcttactgctatttttttccgggattgttatttccacgatgcaaatgacaatacccggaaaatccttctgaactcttcaccttaagcaatatcaaaaaaaatggtaatccataagatcattacttgtttgttcttcccttaacggcgcattattcttaagtcgtaatcgacagagaggcgaatatacagaggtgccctatgaaagatgtcgtagataaatgcagtactaaaggatgtgcgattgatatcggtacggtgattgataacgacaactgtaccagtaagtttagccgcttttttgccacccgcgaagaagcagagtcttttatgaccaaactgaaagagcttgccgccgctacatcctctgcagatgaaggggccagcgtggcctataagattaaggatctggaggggcaagttgagcttgatgcggccttcactttcagttgccaggccgagatgattatttttgagttaagtctgcgtagcttagcttgatggagttgctttagaaggagttaaacatggcttataaacacattggcgtggcaatttccgggaatgaagaagatgccttactggtgaataaagccctggagctcgccagacataatgacgctcacctgacgttaattcatattgatgatggcttaagcgagttgtatccgggtatctacttccctgcaacagaagatattcttcaattgttgaagaataagagcgataacaagctgtataaactgacgaaaaatattcaatggccgaagacaaaactgcgtattgaacgcggagaaatgccggaaacactgctggaaattatgcaaaaagagcagtgcgacctccttgtctgtggtcatcatcacagttttatcaaccgtttgatgccggcatatcgcgggatgatcaataagatgagtgcggatttgctcatcgtgccgtttatcgataagtaaccgcttaccagtaatgctccgctgtcatatggcccggtcggcgacgtaaatgtttcgtcatctgccgggtctctttcagcaactgttgtgtatcgcgcaccatctgtggattgccgcacagcatcacatggctggtttctttattcatcggcaggccaatcgtgctttccagttccccactttcaattaatgccggtatccgtccggtgaggctccccgctgccgtttcccgactgaccaccgtctgaatgcgcagttttccttcgtagcgtttttccagttcctgcatcagtggcaaatagcttaagtcggcggcataacgtgcggcgtgcaccaggaccagatttttgaagcgatctaaatctttacctagttgcagaatgcttaaataagggccaatcgctgtaccggttgccagcatccatagcgtttcgcagtgcggcacttcatcgagcacaaagaatcctgccgcttcgctaaccacctgcacttcatcgcctggtttcagtgccgccagtcgtgggcttaatttgccatcggggacggtgaccaggtaaaactccagatcgggattatcggggctgtttacataggagtaggcgcgctggacgcgttcgccgtcgatttcaaggccaagcttggtaaattgcccggcggtaaacggaagcacgggggcgtgaacggtgagactaaacagggcgtcggtccagttctgcactttagtgactttgcctgttacccaatcagccatgtttttctcctgttttgattgacttgccttatcttcgttctccgaacaaaaaaattccagtcccgaaggactggaaggctcaatcgatcaaatcaatcagaggatgtgcacctgcatttccgggtctttgcgatccagatagtggatggactgaatgcggcgaatggtgcgactcttgccgcggatcagcagcgtttcggtagtcgcgatattgcctttgcggctaatgccttccagcagatcgcctttggtaataccggtggcagagaagatgacgttatcgctgcgcgccatatcgcccaggcgcaatactttaccggcttcgatgcccatcgctttgcagcgtgccagctcctgctcgccaatgcgacgattctcttcgttgtcgcctttgacgtcatgacgcgccagcagacgaccgttcatgtcgccatctaatgcgcggatcaccgccgcagaaactacgccttccggcgcgccaccaataccgtacagcacgtcaacttcgctgtctggcatacaggtgagaatactggccgcaacgtcgccgtccggaatagcaaatacgcgtacgccgagttgctgcatttcagcgataacggcatcgtggcgtggtttagccagaatcgttaccgtcagttcgctcaacggtttgccgagcgccgccgctacattgcgcaggttatccgccagcggcaggttcagatcaatggtgcctttggctcccggcccgacaatcagcttctccatatacatatccggcgcattgaggaagcagcctttatcgcctactgccagcaccgccagcgcgttagcctggcccatcgccgtcatgcgcgtgccttcaatcggatcaacagcaatatctaccgcgtcgccgcgaccagtaccgactttttcaccaatgtagagcatcggtgcttcgtcgatttcaccttcaccaatgacgatggtgccgtcaatgttgacctggttgagcataatacgcatggcgtttaccgccgcgccgtccgcggtgtttttatcgccgcgtcctaaccatttgtagccagccagcgccgcactttcggtgacgcgggaaaattcgatggcaagttctcgtctcatagcaaactctaagcagtaaggaatggcgcgaagtgtagcacaggggaagggagggattattgatgtgtgcggggttgcccccgcacgtttcgggactaccggatgcggcataaacgcttcattcggcatttacattattcgtcgtgttcttcccacgccatcgcgcgtttaaccgcttttttccagcctgcgtaacggtaattacgctcagtggtttcgatgcctggacggaactcgcgctcaatcaccgctttctcttgcagctcgtcgaggttctgccagaagccaaccgccaggcctgcgagataggccgcacccaatgcggtgacttcgcgcacttccgggcgctcaacgcgggtgccgagaatatcggactggaactgcatcaggaaattgtttgctactgcgccaccatccacgcgcagggcgtgcagacggataccagagtcggcctgcatcgcttccagcacgtcacgcgtctgataagcaatagactccagcgtcgcgcgtataatgtggttagcgttcaccccacgagtcagaccgaaaatcgccccgcgcgcatacgggtcccagtacggcgcacccagcccggtaaatgccggaaccacatacacaccattggtgttttgcactttggtggcgaaatattcggaatcgtaggcgtcgttaatcaacttcatttcatcgcgcagccactgaatggatgcgcctgccataaacaccgcaccttccaacgcatagttcacttcgccagtcgggccgcaggcgatggtggtcagcaggccgttttcacttttcaccgctttctcgccagtgttcatcagcataaagcagccagtgccataggtgttcttcgccatcccttctttcacgcacaactgaccaaacagcgcggcctgctggtcaccggcgatcccggagattggaatacgcgtgccgcctttgccgccaatgttagtctgaccgtatacttcggaagaacgacgcacttctggcagcatctcgcgcggaatatccagcacttccagcattttgtcgtcccagtccagggtatggatgttgaacaacatggtacgagaggcgttggtgtaatcggtcacatggacacggccctgagtcattttccagataagccacgtatcaaccgtaccaaacagcaattcaccacgacgtgcacgctcgcgagagccttccacatggtcgaggatccacttcactttggtgccagaaaagtacgggtcaatcaccagaccggtattgctgcggatataatcttctaaaccgtcacgttttaaatgctcgcagatttctgcggtacgacggcactgccagacaatggcgttatagataggcttgccggtttctttttcccagacaatagtggtttcacgctggttcgtaataccgatagctgcaatttgatcggaactgatatcggctttcgccagcacttctaccagcgtggagctttgggtggcccagatttccattgggtcgtgttctacccaacctggttttgggtagatttgctcaaattcgcgctggctcacgctaatgatattggcatcgtgatccattacgaccgcgcgggagctggtggtgccctggtcgagcgcaacgatatattttttttcagtcatgtttaattgtcccgtagtcatattacaggctagctttttgttcactaggagttgtggtttccttttcttccacaacacagatatcgcaaggcaaatggcgaccaatcagtttgcggtaggcaaatgcacctacaatcgcgccaacgatagggccgaaaagcggcaccaggaagtaaggaatgtctctgccgccggtaaaggcgacattgccccagcccgccagccaggcaaagactttcggaccgaagtcacgcgctgggttcatggcaaaacctgtcaatgggcccatagatgcgccaatgaccgcaatcagtagaccaatcagcaagggagccaaagggccgcgtggtacaccgttgccatcgtccgttaacgccaggatcagccccatcagaatagcggtaatcaccatctcaactgcgaaagcctgcacaaaattgatatgaggattagggtaagtagagaaagtgccagccagatcaacactttcaacgctgccgcgaacaatgtgatgagtctgctcgaagtcgaaaaataaattgtagtaaagcccgtaaactaaagccgcagcacagaaagcgccggcaacttgactaacgataaaaggaataactttgcgcttgtcgaaacaggcaaacagccacaatgcaatggtaacagcgggattaagatgcgcgccggaaacccctgcggtcaggtagatggccattgccacccccagtccccaaatgacactgatttcccactgaccaaaagacgcaccagcgacttttagtgctgcaacgcaacccacaccgaagaaaatcaacaacccggtaccgaggaattcagcaatgcactggcctttcaaggtacttgtttgactcataatcggatcctgaagagttaatgtttgttgtatgcgtgaaagtcacggacctccacgatgcttgtaggcatgctgtaaacttatcgttaacgagcaaaaacgagaaatatcgaacttaaaatgtgtgtgcctcgtcataaaatgagcgttatcgcgccatttattccatctgattgtacatgatgcatgtttgttagatcattcgcgcaacaaatttattaacattttcgattgatgtggattatgtcaccaggagaaggatgaaaagtgtggcaaaccgtaatctgcaaggcgtgccgctggacagcgatggcgcggcttcatacaatcggagctaactaaagtgcgctcgtatttattaaggcgtcaccggtaatcgggacgaggatttttatccatcaacgccttgcaattcaggagaggtatgacaatgagtttagaagtgtttgagaaactggaagcaaaagtacagcaggcgattgataccatcactctgttgcagatggaaatcgaagagctgaaagaaaaaaacaacagtctgagccaggaagttcaaaatgcccagcatcagcgcgaagagctggagcgtgagaacaaccatctgaaagaacagcagaacggctggcaggaacgtctgcaggccctgctgggtcgcatggaagaggtctgattacgcttcatcttccgcgtaatttctttactgtgtaggccaacaggtaacgcagaaaaaaggcaccttgcggtgcctttcttatcattcaatatccagcggatcttcactaagaataatcccggtattgtcggcataaagatggtcgccggagaagaaggtgacaccgccaaaattgacgcggacatcgctttcgccaatgccttcgccagcggcaccaaccggaattgccgccatcgcctggatgccgatatccaactcttccaggtcatctacctgacgcaccgcgccgtaaatgaccagaccttcccattcattttgtactgccagacgcgccagttcagcatcgaccagtgcgcgacgaacagaaccaccgccatcgacgacaagaacacgaccacggccattctgttcgagcagatcgtacagcaacccgttgtcctcgaaacattttaccgtgattatttgtccgccaaagctcgcccgtccgccaaagttggagaacagcggttccacgacgttaacatcttcttgatagatgtcacaaagctcggaagtatcgtatttcataggcttaacattcagttgctgcgagaattttcagtatatcgcgctatgtgggctgttggcaaaatcatcaattgttaattgatatttgtcagttatgctgcccactggcttaggaatatccctaaaacaaacagcaggttagtcagtaacgctcccttgacagtacgttccagcattggtcgcatcgccaccgggtccatttcccgcatcacataacgggcttgcttcaccagtaatggtgccgccagcaggaacagccagccccacaggctatgcaggctaaagagattaaacagcgccagacacaccaggctgcccatcagcaggcaggcatgataacgacgcgcgttcacttcacctaagcgcaccaccagcgtgtttttgccattttcgcggtcgctattgatatcacgcaggttattaatattcagtactgccgttgccagcaggccgcatgcggtcgccggaaggatcagtgccggaatcaatgtatgagcctgtaaataccagctccccatgacactcaaccagccaaagaaaaccagtacggaaatatcacccagaccgatataaccataaggacgattgcccacggtgtaggtgatagcggcaatgatgctcaacccgccaagaatcaggaaaccgacaaaatcggccagcgtatggcatgccactgcaaccagtgccagcccggagagacagatgagcacgacggtaataatgagcgcccgtttcatctcttgctgggtaatgacccctttttgcatgccgcgtagcggcccaatgcggtcaggtttatcgctgccttttaccgcatcgccgtaatcattggcgaggttagaaaggatctgtaatagcccggcggtaattagtgccagcagggcgaccagcggatcgaagtgaccttgccaccatgccagcgctgtcccgacgataattgcagcaaaggcgagggggagggttttaggtcgtaaactttccagccacgcctgagttcggctaatttgttgttcagtcataatacgcgccaataaaaatggggcctttcagccccatcaaacaatgatgaaaatgattgaacgcgattataggataaaacggctcagatcttcatctgccaccaacgcatccagatgtttgctcacataatctgcgtcaatagtgatattttgaccgcttaaatcgctggcgtcgtaggaaatctcttccattaaacgctccagaacagtgtgtaaacgacgagcaccgatgttttcggtagattcgttcacctgccatgccgcttccgcgatgcgtttaataccggagtcggtaaactcgatatttacgccttcagtcgccatcagtgctttgtactgcacggtgatagaggcattcggctcggtcagaatacgctcgaagtcgctggtggtcagcgcctgcagttcaacgcggattggcagacgaccttgcagttccgggatcaggtcagacggtttcgcaatctggaacgcgccagaagcgataaacagaatgtggtcagttttgaccatcccgtgtttggtggaaacggtgcaaccttctaccagcggcagcaggtcacgctgaacgccttcacgagaaacatccggaccggaagactcgccgcgcttacagattttgtcgatttcgtcgataaacacgatcccgtgctgctcaacagcgtcgatagcgtcttgcttcagctcttccgggttcaccagtttcgccgcttcttcttcaatcagcagcttcatggcgtctttgattttcagcttacgcgctttttgcttctggccgcccaggttctggaacatggactgcagctggctggtcatctcttccatgcccggaggagccataatttcaacgcccatcggtgctgcggcaagatcgatctcgatttctttgtcatcaagctggccttcacgcagttttttgcggaatgcctgacgagcagcggacggttcctgctgctgttcggtctgtccccagttgtttttagcaggtgggatcagcacgtcgagaatacgttcttctgccagttcttcagcgcgataacggtttttctcgatagcctggacgcgtaccattttcacggcggcatcggtcagatcgcgaataatagaatccacttccttaccgacgtagcccacttcggtgaatttggtcgcttcaactttgatgaacggcgcattcgccagcttagccagacgacgggcgatttcagttttaccgacaccggtcgggccgatcatcaggatatttttcggggtcacttcatggcgcagctcttcgttgagctgcatgcgacgccagcggttacgcagagcaatcgccacagaacgcttggcgttgtcctggccgatgatgtgcttatccagttcgctgacgatttcgcgtggggtcatttcagacatgggagatccttacgctttgtagcttaattcttcgatggtgtggaaatggttggtatagatgcaaatgtcgcctgcaatatccaacgccttttcagcaatttcacgggcgctaagttcagtgttttctaacagcgcgcgcgccgcagcctgggcgtaagggccgccggagccgatagcaataagatcgttttctggctgcaccacgtcaccgttaccggtgatgataaggcttgcagtttcatccgcgactgccagcagtgcttcaagtttgcgcagcatgcgatcggtacgccagtcttttgccagctcaacggcggctttgaccagatggccctgatgcatttccagtttacgttcaaacagttcgaacagcgtaaaagcatccgcagtaccgcccgcaaagcccgcgatgactttgtcgttgtacagacggcggacctttttcacgttgcctttcattacggtattgcccaacgtggcctgaccatcaccagcgatgaccacatggccgttacggcgtacgcttactatagttgtcacgagctgaccccttggttacgaatacagagtacaaaccccgtacaaaagtacggggcataatgcaattatagatgggggggattttgagggtttcaacccccggcggcgagccgaatgcagtttgtatgacccgccatcttcaaccgattgagggtgctgtctgcgttctctttgcctttcaccgggccaatgaccacacgattccagccattgttggtggtgattttgctgtcaaagccttcgaacgccagctgagcacgtaccgtctctgcctgttccgcgcctctgaagctaccgcactgcaccatccagcggcgttcgtcttttttctccgccgtcggttttggcgcgtcagcggcacgagcaactggcgcagcttgctgcggcttgctctgcgcagtcgtgtgcgcaggagtttgcagcagatcctggtacggctgctgagaagaagccggtttagactggcgcggttgcgcctgtaccggtgcggcttggctcgtacgcgtctgctgctgccagctttgttcagtcgtacggctctgctgagccaggcgttgctgttccgctaattgctgcgcctgacgttggcgctgtagcgtttgctgacgctgttccggcgtctgttcattccacggaacttcaaccagctgcgttggctgctggcgcatatcagcctgcatttgttcaagaagctgacgttgttctggtgtcagttgctccggcgttttcacttcaccaccggcagaaggttctgtgggcgcacgcactcccggctggcgactttccagctctttaatgtagcgccagcgttcttctggttttggtggtagtccgtttccggtcactttctggctttgcagcgtctcggactcttctttcttgtgatgcgtaatgaagtacagaccaccgataaaggtcacaagaacggcggcagcaatagcgaccatagcgggagaaaccgcaggcagatttcgttgctttttccgactggtgctcttttttcgccggctaggtgccggttggctgcggcgtacataatctcgttgtgccactatcgtttcgctgtatttattcgttcgtcagcccgccatgttacttaagcggcgggcctttgaccagtcacggcagtcttaaaggtttactttaaggtaacgcgcgtgtacttccccggatgataagttcgcagtccattaaacgagagccactgccaacgtgttgcccctgcatttgatcaagcaataacagcatagcttcccgaccgatttcgtaacgcggctgcgcgatggttgtcagcggcggatcacaaaattgcgtcaggtcgatgttatcaaaaccgattatggaaaggtcttccgggactttcagcccctggcgttttgcctgagaaagtgcgccgagcgccatcacatcgctatggcagaagacagcagtaggcggttgtggaagatcaagcagctgctgcatcgctttgcttccggcttcgaaggtgaagtcgccacgggcgatgtattgcggatcaaccataatgccgcagcgacgcagcgcctgaacatagccttgcaggcggtagtgacacagcggcatctcttcgggaccggctatacagccaatccgtttatgcccttgctcatataaataatttactgcatcaaatgcggcggtcagattgtcgatatgaactgtaggcagctccagctccggtgcaaattcgttcgccatcaccatcggcggcagattacgctgttcctcaatgctggcatcaaacggcagcctactacccagcaacaacatgccatcaatttgcttggtgatgatcaaatcgataaaggttttttcctgctgattttgatgcgcacagtcgccaatcagcaccagatatccgtgatttgccgccgtaacttcgataccgcgaataatttcgctaaagaagggatcgcagatatccgggacaatcaccagaatggtgcgggattcattacgcttgacgttgcgccccataggctgcggtaaataacccacttcccgggccgctttttcaacccgattacgggtggcctgggagactttatcgggattcattaatgctcgggagacggtcgctgtagagacttttgccttgagggcaacgtctttcatggtcgcggcagtttcctgcttcttcgctttcacactcactcctcgcctggcacgtcaggcgtactacatccatgtttacttcacatcggcaacatttttagcagatagcgcgtgaaaacggttacagaattttcatgaaaagtgtgatgaatattgaatttttcgatccgcctcgcatcgtgagcggtttaaccctcaatcggatcaacatccagcacccatttcaccttacgggaatccggtattgtattgatgagcgccagcgtaccgttaatgatgtgttgcaagcgcacgcgggaagggtgctgcaacaatatctgccagcgccagcgaccgccacgtttaggtgccagagccggaaccggaccgagaacccacagtttctcgtctgccagtgggctggagaggatcagattacgcagttgttgcaggaacaatggcgcgtgctgattgttatgatcttccgcacgcacaatcacatggctggtccacggcggtagctgcatcattcgccgctcagccagcgcctgttcggcaaaggcgtcgtagcctttatagagcaacgtttgcaacagaggatgttccggatggtgcgtttgcagcaccacttcgccctgtttacccgcacgcccggcacgaccggcgacctgggtgtaaagctgagcgaaacgctctgcgctgcgaaaatcggcagaaaacagcgcgccgtccacgtccagtaatgcaaccagcgtcacatccgggaaatggtgacctttcgccagcatttgtgtaccaatcaaaatccgcgcgccgccgcgatgtacttctgccagttgctgttccagcgcccctttgcggctggtggtatcgcggtcgatacgagaaatgggcacgccggggaacaacggcgcgagcgtctgttcaagctgttcggtgcccagccccacggggaccaggtgcgtggaaccgcaggaagggcactggcgcggcaccggacgctgactgtcacagtggtggcagcgcagatggtgctgcgcctgatgcagcgtgtagtagtgatcgcaacgtgggcattcggcaatccagccacagtcgtggcacagcagtgcaggcgcaaagccacggcggttaagaaagagaatgacctggttatcagcctgtaaatgctggcgcatacgagtgattaacgccggagccagacctgcctgcaccttctgaccttttaaatccagcacatgttgaattgccggacgcgcattccctgcccgacgggtcaggcgcagcaggcggtattttttctgctggacgttgcataacgtttccagcgcgggcgttgcggagccaagaataatcgggatttgctcgctgtgcgcacgatacaccgccaggtcgcgggcatgatagcgccagccttcctgctgcttgtaggagctgtcgtgctcttcatcaatgacaatcacgccgagatttttaaacggcgtaaacagcgcggagcgggtgccgatcacaatcgccgcctcaccatttttcgctttcagccacgcgctaagacgctcgctgtcgttcaggccggaatgcagaacttccacgggggcattaaaacgttcacgaaaacgggcgatagtttgcggtgtcaggccgatttccggcaccatcaccagcgcctgtttgccctgagcgagcacgttttccagtacgctgagataaacctccgttttaccggaaccggtaacgcccgccagcagccaggcagaaaaagtatctgccgcgctatgaattgcgccaacggcggtggcctgttcggtattcaatcgcaaccgctcaccagaaacggcatagttcgttcgccagtcgctaaactctggtgtttcacttgctaaatcacacagaccttttttgcgtagcgcctgcaacgcggcatcattaaattcgagcgtggcgacctggtcgcgccagattttgccttgccgtaacgccgccagcgcctgttgttgcttgggggagcgtttcaggctgttcagatccaccgcctggccttgttcagtggcaaaccagtaccacatcggcgcgttcgccgcaggccgcccctggcgtagtaaaatcggcaaggcatgaaacagcacatcgccaatcggatgatgatagtaatctgccgcccatagcagcaatcgccagacggagtgagtaaacaccggctcactatccagcacttcgactaccgcttttagctcattgagcggcagttcgctggcatcgctaacacttaccacaatcccgatgcgctcctgctgtttgccaaacggcacgcgcacgcgacacccagctttaaccgtcatgccttctggcagcagatagtcaaaggtacgaggaagcggaacgggcaaggcaacgtgggcaacgggcatagcatcatcctgacttgaaattcggtgggttagtatacacattgccgtagaagagtgcggatcagtttgcatacgctggttaatttctgtatgatttcgcgccttcgtacgaaatgatcgtattgaagctatacttttaacatcgcgtggtgtctggcgttagggctggaagagcgacgcggccttaaaccgaggttttcccatgaaaaaagatattcacccgaaatacgaagaaattactgctagctgctcttgcggtaacgtaatgaaaatccgctccaccgttggtcatgacctgaacctcgacgtgtgcagcaagtgccacccgttcttcactggcaaacagcgtgatgttgctaccggtggccgtgttgaccgcttcaacaagcgtttcaacatcccgggcagcaaataagaccggatttccgaaaaaagcgccgcacggcgctttttttgtgcctgaattttggtcgtattaccagctaaacagcggccattctttggcgaccgtggtgagttgtggcgcatcgaaaacggcttgtgggctgaccaccgtttcctcaagcggaatattcttgccgtaacgttctttgagctttgcctgaacttgtgggctgctcaggtcgaactctttcaacttctgctgctcgcccacgcgcattcccagcgcgttctggtaaaccttccacaccacttcgctacagtactggcgatcgtcgctccaactgaagctgaaatcatacggtttaccgagataacgttttgccgtttgcgccagtttttgctgttgttcaacactcagtccgccttcaacgcggcgaacaacgtatttgcccttttcaccatgggcgatccactgcttgagcggggtgtatttcaccgggccgactgcttcaaaaacgtagggctttttgttgcgtatcaccagcataccggtgtggctataatcggtatgggtcgccagttggatcgctttactttggctactgcgagagatctgaaagatgatgtcgccggtttgtggctgccaggcaaaggcaggtacagaaaccagcaggctgaggatcagcagcctgtttttcatagttaaacgtccatgtataaaaagcggtgggtcgcagacaacgtgctcgttgtttatgccggatgcggcgtgaacgccttatccggcctacaagttcgtgcaaattcaataaattgcaatatgacgtaggcctgataagcgtagcgcatcaggcgattccactccgcgccgctcttttttgctttagtattcccacgtctccgggttaatccccatctcacgcatgatctcttttgccgcttccgggatttcgtcgctgcgctctttacgcagatcggcatcatccggcaaaggttgcccggtaaaggcatgcagaaacgcttcgcacagcagctcgctgttggtagcgtgacgcaggttgttcacctgacgacgcgtgcgttcatcggtgaggatttttaacaccttaagaggaatggaaaccgtaatctttttgacttgttcactcttcttgccgtgctcagcgtatgggctgatatattcgccgctccattcagccatgagatacttaatcctcttcgtcaataaattgagaccagaccacacagttgatgtgggtactgaccgtaaacccgcatagtttaccgtacaggcgttaccgtgacatcgtgtaatgcacctgtcggcgtgataatgcatataattttaacggctatttgggatttgctcaatctatacgcaaagaagtttagatgtccagatgtattgacgtccattaacacaatgtttactctggtgcctgacatttcaccgacaaagcccagggaacttcatcacatgacgcgtaaacaggccaccatcgcagtgcgtagcgggttaaatgacgacgaacagtatggttgcgttgtcccaccgatccatctttccagcacctataactttaccggatttaatgaaccgcgcgcgcatgattacagccgtcgcggcaacccaacgcgcgatgtggttcagcgtgcgctggcagaactggaaggtggtgctggtgcagtacttactaataccggcatgtccgcgattcacctggtaacgaccgtctttttgaaacctggcgatctgctggttgcgccgcacgactgctacggcggtagctatcgcctgttcgacagtctggcgaaacgcggttgctatcgcgtgttgtttgttgatcaaggcgatgaacaggcattacgggcagcgctggcagaaaaacccaaactggtactggtagaaagcccaagtaatccattgttacgcgtcgtggatattgcgaaaatctgccatctggcaagggaagtcggggcggtgagcgtggtggataacaccttcttaagcccggcattacaaaatccgctggcattaggtgccgatctggtgttgcatagttgcacgaaatatctgaacggtcacagtgacgtagtggccggcgtggtgattgctaaagacccggacgttgtcactgaactggcctggtgggcaaacaatattggcgtgacgggcggcgcgtttgacagctatctgctgctacgtgggttgcgaacgctggtgccgcgtatggagctggcgcagcgcaacgcgcaggcgattgtgaaatacctgcaaacccagccgttggtgaaaaaactgtatcacccgagcttgccggaaaatcaggggcatgaaattgccgcgcgccagcaaaaaggctttggcgcaatgttgagttttgaactggatggcgatgagcagacgctgcgtcgtttcctgggcgggctgagcttgtttacgctggcggaaagtttagggggagtggaaagtttaatctctcacgccgcaaccatgacacatgcaggcatggcaccagaagcgcgtgctgccgccgggatctccgagacgctgctgcgtatctccaccggtattgaagatggcgaagatttaattgccgacctggaaaatggcttccgggctgcaaacaaggggtaaaaatgagtgtgattgcgcaggcaggggcgaaaggtcgtcagctgcataaatttggtggcagtagtctggctgatgtgaagtgttatttgcgtgtcgcgggcattatggcggagtactctcagcctgacgatatgatggtggtttccgccgccggtagcaccactaaccagttgattaactggttgaaactaagccagaccgatcgtctctctgcgcatcaggttcaacaaacgctgcgtcgctatcagtgcgatctgattagcggtctgctacccgctgaagaagccgatagcctcattagcgcttttgtcagcgaccttgagcgcctggcggcgctgctcgacagcggtattaacgacgcagtgtatgcggaagtggtgggccacggggaagtatggagcgcacgtctgatgtctgcggtacttaatcaacaagggctgccagcggcctggcttgatgcccgcgagtttttacgcgctgaacgcgccgcacaaccgcaggttgatgaagggctttcttacccgttgctgcaatagctgctggtgcaacatccgggcaaacgtctggtggtgaccggatttatcagccgcaacaacgccggtgaaacggtgctgctggggcgtaacggttccgactattccgcgacacaaatcggtgcgctggcgggtgtttctcgcgtaaccatctggagcgacgtcgccggggtatacagtgccgacccgcgtaaagtgaaagatgcctgcctgctgccgttgctgcgtctggatgaggccagcgaactggcgcgcctggcggctcccgttcttcacgcccgtactttacagccggtttctggcagcgaaatcgacctgcaactgcgctgtagctacacgccggatcaaggttccacacgcattgaacgcgtgctggcctccggtactggtgcgcgtattgtcaccagccacgatgatgtctgtttgattgagtttcaggtgcccgccagtcaggatttcaaactggcgcataaagagatcgaccaaatcctgaaacgcgcgcaggtacgcccgctggcggttggcgtacataacgatcgccagttgctgcaattttgctacaccagtgaagtggccgacagtgcgctgaaaaacctcgacgaagcgggattacctggcgaactgcgcctgcgtcaggggctggcgctggtggcgatggtcggtgcaggcgtcacccgtaacccgctgcattgccaccgcttctggcagcaactgaaaggccagccggtcgaatttacctggcagtccgatgacggcatcagcctggtggcagtactgcgcaccggcccgaccgaaagcctgattcaggggctgcatcagtccgtcttccgcgcagaaaaacgcatcggcctggtattgttcggtaagggcaatatcggttcccgttggctggaactgttcgcccgtgagcagagcacgcttagcgcacgtaccggctttgagtttgtgctggcaggtgtggtggacagccgccgcagcctgttgagctatgacgggctggacgccagccgcgcgttagccttcttcaacgatgaagcggttgagcaggatgaagagagcttgttcctgtggatgcgcgcccatccgtatgatgatttagtggtgctggacgttaccgccagccagcagcttgctgatcagtatcttgatttcgccagccacggtttccacgttatcagcgccaacaaactggcgggagccagcgacagcaataaatatcgccagatccacgacgccttcgaaaaaaccgggcgtcactggctgtacaatgccaccgtcggtgcgggcttgccgatcaaccacaccgtgcgcgatctgatcgacagcggcgatactattttgagcatcagcgggatcttctccggcacgctctcctggctgttcctgcaattcgacggtagcgtgccgtttaccgagctggtggatcaggcgtggcagcagggcttaaccgaacctgacccgcgtgacgatctctctggcaaagacgtgatgcgcaagctggtgattctggcgcgtgaagcaggttacaacatcgaaccggatcaggtacgtgtggaaagcctggtgcctgctcattgcgaaggcggcagcatcgaccatttctttgaaaatggcgatgaactgaacgagcagatggtgcaacggctggaagcggcccgcgaaatggggctggtgctgcgctacgtggcgcgtttcgatgccaacggtaaagcgcgtgtaggcgtggaagcggtgcgtgaagatcatccgttggcaagtctgctgccgtgcgataacgtctttgccatcgaaagccgctggtatcgcgataaccctctggtgatccgcggacctggcgctgggcgcgacgtcaccgccggggcgattcagagcgatatcaaccggctggcacagttgttgtaatttcagaaatttaataatgcccggtactcatgttttcgggtttatggtttctaatgaaatatattgaattatcataggattaggccggattaagcgtttacgacgaatccggcaagaagcaataagtacatggttagtttatatttgcagtccggtttgctttgcataccggattttctttttcttaccatcctgaagttttttcatcttccctgatttttcctcaccatcattggtcatttttcggttgacgcccttcggcttttccttcatctttacatctggacgtctaaacggatagatgtgcacaacacaacatataactacaagcgattgatgaggtaaggtatgagcttttttcacgccagccagcgggatgccctgaatcagagcctggcagaagtccaggggcagattaacgttagcttcgagtttttcccgccgcgtaccagtgaaatggagcagaccctgtggaactccatcgatcgccttagcagcctgaaaccgaagtttgtaagcgtgacctatggcgcgaactccggcgagcgcgaccgtacgcacagcattattaaaggcattaaagatcgcactggtctggaagcggcaccgcatcttacttgcattgatgcgacgcccgacgagctgcgcaccattgcacgcgactactggaataacggtattcgtcatatcgtggcgctgcgtggcgatctgccgccgggaagtggtaagccagaaatgtatgcttctgacctggtgacgctgttaaaagaagtggcagatttcgatatctccgtggcggcgtatccggaagttcacccggaagcaaaaagcgctcaggcggatttgcttaatctgaaacgcaaagtggatgccggagccaaccgcgcgattactcagttcttcttcgatgtcgaaagctacctgcgttttcgtgaccgctgtgtaagcgcgggcattgatgtggaaattattccgggaattttgccggtatctaactttaaacaggcgaagaaatttgccgatatgaccaacgtgcgtattccggcgtggatggcgcaaatgttcgacggtctggatgatgatgccgaaacccgcaaactggttggcgcgaatattgccatggatatggtgaagattttaagccgtgaaggagtgaaagatttccacttctatacgcttaaccgtgctgaaatgagttacgcgatttgccatacgctgggggttcgacctggtttataaatagtgtggcttttgtgaaaatcacacagtgatcacaaattttaaacagagcacaaaatgctgcctcgaaatgagggcgggaaaataaggttatcagccttgttttctccctcattacttgaaggatatgaagctaaaacccttttttataaagcatttgtccgaattcggacataatcaaaaaagcttaattaagatcaatttgatctacatctctttaaccaacaatatgtaagatctcaactatcgcatccgtggattaattcaattataacttctctctaacgctgtgtatcgtaacggtaacactgtagaggggagcacattgatgagcacgagtgacgatatccataacaccacagccactggcaaatgcccgttccatcagggcggtcacgaccagagtgcgggggcgggcacaaccactcgcgactggtggccaaatcaacttcgtgttgacctgttaaaccaacattctaatcgttctaacccactgggtgaggactttgactaccgcaaagaattcagcaaattagattactacggcctgaaaaaagatctgaaagccctgttgacagaatctcaaccgtggtggccagccgactggggcagttacgccggtctgtttattcgtatggcctggcacggcgcggggacttaccgtagtatcgatggacgcggtggcgcgggtcgtggtcagcaacgttttgcaccgctgaactcctggccggataacgtaagcctcgataaagcgcgtcgcctgttgtggccaatcaaacagaaatatggtcagaaaatctcctgggccgacctgtttatcctcgcgggtaacgtggcgctagaaaactccggcttccgtaccttcggttttggtgccggtcgtgaagacgtctgggaaccggatctggatgttaactggggtgatgaaaaagcctggctgactcaccgtcatccggaagcgctggcgaaagcaccgctgggtgcaaccgagatgggtctgatttacgttaacccggaaggcccggatcacagcggcgaaccgctttctgcggcagcagctatccgcgcgaccttcggcaacatgggcatgaacgacgaagaaaccgtggcgctgattgcgggtggtcatacgctgggtaaaacccacggtgccggtccgacaagtaatgtaggtcctgatccagaagctgcaccgattgaagaacaaggtttaggttgggcgagcacttacggcagcggcgttggcgcagatgccattacctctggtctggaagtagtctggacccagacgccgacccagtggagcaactatttcttcgagaacctgttcaagtatgagtgggtacagacccgcagcccggctggcgcaatccagttcgaagcggtagacgcaccggaaattatcccggatccgtttgatccgagcaagaaacgtaaaccgacaatgctggtgaccgacctgacgctgcgttttgatcctgagttcgagaagatctctcgtcgtttcctcaacgatccgcaggcgttcaacgaagcctttgcccgtgcctggttcaaactgacgcacagggatatggggccgaaatctcgctacatcgggccggaagtgccgaaagaagatctgatctggcaagatccgctgccgcagccgatctacaacccgaccgagcaggacattatcgatctgaaattcgcgattgcggattctggtctgtctgttagtgagctggtaagcgtggcctgggcatctgcttctaccttccgtggtggcgacaaacgcggtggtgccaacggtgcgcgtctggcattaatgccgcagcgcgactgggatgtgaacgccgcagccgttcgtgctctgcctgttctggagaaaatccagaaagagtctggtaaagccagcctggcggatatcatagtgctggctggtgtggttggtgttgagaaagccgcaagcgccgcaggtttgagcattcatgtaccgtttgcgccgggtcgcgttgatgcgcgtcaggatcagactgacattgagatgtttgagctgctggagccaattgctgacggtttccgtaactatcgcgctcgtctggacgtttccaccaccgagagtctgctgatcgacaaagcacagcaactgacgctgaccgcgccggaaatgactgcgctggtgggcggcatgcgtgtactgggtgccaacttcgatggcagcaaaaacggcgtcttcactgaccgcgttggcgtattgagcaatgacttcttcgtgaacttgctggatatgcgttacgagtggaaagcgaccgacgaaagcaaagagctgttcgaaggccgtgaccgtgaaaccggcgaagtgaaatttacggccagccgtgcggatctggtgtttggttctaactccgtcctgcgtgcggtggcggaagtttacgccagtagcgatgcccacgagaagtttgttaaagacttcgtggcggcatgggtgaaagtgatgaacctcgaccgtttcgacctgctgtaatctgaccccgttcagcggctgcttgctggcagtcgctgaacgttctttaccagcgtatagtgggcgaacgaaaactacacactggatctctcatgtctgccgcaggaaagagcaacccactggcaatcagtggcctggttgtgctcacacttatctggagttatagctggattttcatgaagcaagtcaccagttacatcggtgccttcgactttaccgccttacgctgcattttcggcgctctcgttttattcatcgtccttttattacgtggtcgcggaatgcgcccgacaccgtttaaatacaccttagccattgccctgttacaaacctgcgggatggttggtctggcgcagtgggcgttggtcagcggaggtgcggggaaggtggcgatcctgagctataccatgccgttctgggtggtgattttcgccgcgttgtttctcggtgaacgcctgcgacgtgggcaatatttcgcgattctgattgccgctttcggcttatttttggtgttgcagccgtggcaactcgatttctctagcatgaaaagtgccatgctggcaatcctctccggcgtcagttggggggcgagcgcgattgttgctaaacgtctgtatgcccgtcatccgcgcgtggatttattgagcttaacatcctggcagatgctgtatgcggcgctggtgatgagtgtggtcgctttactggtgccgcaacgtgaaattgactggcagcccaccgtgttctgggcgctggcctacagtgcgattctggcgacggcactggcgtggagcttatggttgtttgtattgaaaaacttgcctgccagtattgccagcttaagcacactggccgttcccgtttgcggcgtactcttttcctggtggctgctcggcgagaatccgggggccgttgaaggtagcggtattgtgctgattgtgctggcactggcgctggtgagccgtaagaaaaaagaagccgtcagtgtaaaaaggatctgaattttttcttcatgtggggcgatctcttatttaacaaaataacgataatgccccaccatccgccagttaaacagcacatcttcttcctgcgcgcctgcgccaatgttatgtatcaccagcggcgtaccgtcgcgggcgaagccatcactaaccaccccaatatgtgccagcccgttatccagtcgccaggagacaatatcgcccgcttgatagtcactggggttcttgctggtggggcgtgttttatcatggcggctaaaccaggtttccagattaggcacccgacggtgatcgatgttgctgtccgggcgctttaacttccatttttgcgggtactcagcaaaattcttcgccatatcttcgtgaaccagtttctgcaaatcgaccttctggctgcgcaatgcgcggatcaccacatcggaacatacaccgcgttcttgcggaacatcaccgccaggataagtaagctgcacatacgccggatcgtaaaatagcgtgctgccaatttgctgtctggcaccgtctgcgatggcaaggttggtattggcctggatttgtaccacggttggtggaacggcgggagattttaaggagtggctggtaaatgccgttagcaggctgagcagcgccagactagctttcatctggttcgtccgtgaaaataagagtcacagattcgaccttccgggctaacgattgttctgtagagaaaatgtccagaagcggataaaaaattcctgaacaacgtgggagtttcagattactggcacagagtgccggatgcggagtgaacgccttatccggcctacaaaagcacgcaaattcaatatattgcagagattgcgtaggcctgataagcgtagcgcatcaggcaattttgcgttcaaactcccggacaagccgggagtttggagtaggttattcccactcttgcaggaaacgctgaccgtactggtcggctaccagcagagcggcgtaaacctgatctggcgtcgcgccgccaggcatgttgtgaatggtttcaccttctgcacatgccgcttctgccacaattcgcattttcgccgggacatcttctttaatatccagttgagcgagagttattggcaaacctaccgcatggctaagggcagctacggtttcgatttcctccaccggcgcattttccagaaccagctgcgtcagcgtaccgaatgccactttttcaccgtgataatagtgatgcgcgtccgggatagcggtcaggccgttatgcactgcgtgcgccgcagccagaccaccactttcaaaaccaacaccgctcaaataggtgttcgcttcaatcacgcgctccagcgccggagtcactacatgctgttcggcagcaagcatcgctttttcgccttcttccagcagggtgttgtagcacagttcagccagtgccagcgcagcctgggtgcacttgccgcccgccatggtggtcgcgccgctacgagagcaggcacgcgcttcaaaccaggttgccagcgcatcgccgatacccgccgctaacagacgtgcaggtgcgccagcgacgattttggtgtcgacaatgaccatattcgggttatttggcaacagcagatagcggtcaaactcaccctcatcggtgtagataacagacaatgcgctgcacggtgcatcggtagaggcgatagtcggtgcgatcgctaccggaacacccatgaaatgtgccagtgctttggcagtatcgagggtttttccgccaccgataccgagaattgcgccacactgcgcagtctccgcgatgccacgcagacggtcgatctcattttggctacattcaccgccaaacggcgcaatttctactaccagtccagcatctttaaagcttttctcgacagtggattgagcaaaacctaaaacaaatttgtcacccaccactaaccagcgttctgccagcggcttcaggtattcgcccagacgattaatcacatcagcgccctggatgtatttacccggactttgaataatgcggtccataattgctcctttagagatgagtagtgccaaatgcggcattccagtcgtgttcgaacttctctatagcactctctaccgcaggggtgttgagcatttgttgcgctacatctaagggcagggtgatggattcacatcctgccagtaaacagtccagcgcctgacgcggcgttttaaagctggctgccagcaccatgctttctggcgcgtgcatttctaacagcgtttgcagctcctgaaccgtacgaatgccgtctccgccctgggcatctacgcggttaacatacggagcaacgtattttgcccctgccagtgcggctaataacccttgtgcggcgctatatacagcagtgccaagtgtagtaataccctcttttttcagtattttaattgctgccagaccttcggaagtcaccgggattttcaccacaatacccggaatagcgtcgcgcaggcgcttcgcttcttccaccatcccctgcgcgtcgcggctcatggtctgagcaaacagaatgccctcatcaccaatcgctttttgcagacgcggcagcacttcccatatggactccttgctggcagcgataatgctcgggttagttgtcaccccggcaatggggaatatgcgtgccagacgttcgacttctgcgacgttagcggtgtccagatacagttccatgatgtttccttttacagttccagttcatgttgcagcaggctggcgatagcgtcggcagaggcggcgttaaccagcgcgttacggaattcttcgtgcatgatgcggcgagcgaggcggctgaaaatgcgcatatgctgatcgcccgcagcgtgtttgttcagggttaacataatgatgaattgcgcttcatcatcgccccagcgcaccggcgcttgcagacgcgccacgctgatggtggattgctcaatgtgttcacttttgctgtgtggaatggcaaaactaaagcccagaccggtagagaaaacggcctcgcgcgcccacaagtcggcttccagtttacgcggatagcggcagcggcccgccagcagcaggttatcggtcatgcctttgagcacttcttctttgctgcgccagtcgctttccagtgtgatgcactcggcggtgaccagcggtgcgtcttgttgggtcatgcggaattgcgccagcaggtgttctacttccaggctagtacggcaggccattgcctggttgagcaacttgcggcactcacggctatcaagttgcgccatccgagctttcgccgccggaatacttggtgcgctcatgctgagttcatccagccctaagccgaccagcaacggcagcacggaacctttcgctcccagctcaccgcacagaccaatccatttgccctggcgatgcaccgcttgcacggcgtaatcgagcgcccgcaagaatgccggattcaggctgttgtagtgacgagtaaccttagcgttatcgcgatccaccgccagcagatactgcgtcaggtcattactaccaatactaaagaaatcaatctcttcgcagcattgatcgatgatgaacatcacgctcggcacttccagcatgatgccgagctggattttctcatcaaacggaatgtgttcgttacgtagttgctgtttggcttccgccagtttttctttcacccataagatctcttccatactggagatcatcgggatcatgattttcaggctgccgtgagcggaggcgcggaggatgctccgtagctgcgtggtaaacaagctcgcgtactcttcataaatacgcacggcgcgataaccgaggaacgggtttgcctctgcgggaatgttcagataatcaacgggtttgtcgccgccaatgtccatagtgcgcacaataatgctgcgtccgttggcggattccagcgcctgacaaaaaatgttgtacaactcgctttcgcccggtgcgctggtgcgatccatatagagcatttcagtgcggaacaaaccaacgccttccgcaccattgccgaatgcggcctgcgcttccacggagtgagcgatgttagcggcaatttcaatgcggataccgtcagcggtacgggcttgttgggtcagccagacacgctgttgctcacgcagggcgtcctgtacgcgggcttcttgctgataataacgagctacggcttcccctggctcaaccacaatcgccccggcgttgccgtcgatataaatcgtttgttgctgccacggagtaagggcatcaatatccacaccaaccagcgttggaatgttgaagctacgggcaaggatcaccgtatgactggtggtgccgccgcttttgagcaacaatcctttgaggtgatttttatccagttcgaggaactggctgggggtcagttcatcagccatacaaatggcgggctgcgtcagtttgcccggtgccgggaagcgttgctcaccgtagatttgctggagtaactggaagcagacgtcgcgtacgtccagggcacgttcttgcaggtagctgctgctggaacgggaaaactcttcgcaaaagtgattcgcgctggcaacaattgcttcggcgcagcttaatccggcgctgacgcctgccagtaaatgttcgcgcagggaagtatcgccagccagggatcggtgagcttccagaatcgcgctggtagcaccgtcgctatccagcagacgaaactcaatgtttttcagtaccagcgtcaggccgttttccagtgcggattgctcggcgtcaacgcctttggctgcgggaagattacccagcgcattgagatctaaagaagagatcggcgtcagaatgccgcctgcactaccgctgcacacggtgcgggcgcggataatttgcggattcagattggtcagactaaccggcagtggttccagttcgtcagatttaacttccgccagcggcgcatcgcagtgggggaattcatcgcgcagccattggcttaaacgctggtgcgcttcctgttcgtcggccccggaaatcagtaactggcagttatcgcccgccagcgtatcggtgccaatcagcgcaagggcgcttttggcgttgcccttgcggtcagtgcgcaggttatgccactcaatttgactactaaaagtattacacagcgtttcaacgtggcttgccggacgcgcatgtacgccgttaggtagctcacaaataaattccacaatcagggccattgcctctctcccggtacggttttctgtttacaggataagagcgcacggcaacggcctgccatgtgacaaatctgccaaaagctggacaaatgtaatgtaaccgtcaatttgcgacgcgtctcacaagacgctgttttgcggcatgcttccggtttatcgcaagttatgaggcggatcgcatttttgtactgatattacaaaagtccagtaaatggcctttttatccactgtttgctccgcctgcgattgcctattgtttcctccatcaaaaatatggacatgggctttcgcaagcccgggagcagcttatgaatgagttggtgcagatcctgaaaaatacccgtcagcatttaatgacgggcgttagtcacatgattcccttcgtggtaagcggcggtattttgctggcggtttccgtcatgttgtatggcaaaggcgcagtgccggatgccgtagccgatccaaatctgaaaaaactgtttgatatcggcgttgcgggcttgacgctgatggtgcctttcctcgcagcgtacatcggttattccattgcagagcgttctgcgctggctccgtgcgctatcggtgcctgggttggtaacagctttggtgcgggcttctttggtgcactgatcgccgggattatcggcggcatcgtggtgcattacctgaagaaaattccggtgcataaagttctgcgcagcgtgatgcctatcttcattattcctatcgtcggcacactgattaccgcaggcatcatgatgtggggcttgggcgagcctgtaggggcgttgaccaacagcctgactcagtggcttcaggggatgcagcagggcagcattgttatgctggcggtgatcatgggtctgatgctggcgttcgatatgggcggtccggttaacaaagtggcctatgccttcatgctgatttgcgttgctcagggtgtttataccgtggtggccatcgctgccgtgggtatttgtatcccgccgctggggatggggctggcgacgctgattggtcgtaaaaatttctccgcagaagagcgcgaaaccggcaaagcggcactggtgatgggctgtgttggcgttactgaaggggcgattcctttcgccgctgccgatccgctgcgtgtcattccttccatcatggtcggtagtgtttgtggtgcagtaactgcggcgctggtcggtgcgcagtgctatgcaggctggggtggtctgattgtgctgccggtggttgaaggcaagctgggttatatcgcagcagtggctgtcggagcagtggtgacggctgtttgtgtgaacgtgctgaaaagtctggcgcgtaaaaatgggtctagcactgatgaaaaagaagacgacctggatttggattttgaaattaattaattgaggaacgagccatgacgaaaattattgcagtaaccgcatgtcctagtggtgttgcccatacctatatggcagcagaggcgctggaaagtgccgcgaaagcgaaaggctgggaagtgaaagtagaaacccaggggagtattggtctggaaaatgaactgactgcggaagatgtggcgagcgctgatatggtgattctgaccaaagatatcggcatcaagtttgaagagcgttttgctggcaagaccatcgtgcgcgtcaacatcagcgatgcagtaaaacgtgctgacgccattatgagcaaaattgaagctcacctggcgcaaaccgcttaagttcttctcccgctcgcaagggcgggttcgctttcccacaggagttcctcatgacgaatcgtatctctcgcctcaaaactgcactgtttgccaatacccgtgaaatcagcctggagcgggcgctgctttataccgccagccatcggcaaaccgaaggcgaaccggtgatattgcgccgggcgaaagcaacagcgtatatccttgaacatgttgaaattagcattcgtgatgaagaactgattgccggtaaccgcaccgtaaaaccgcgcgccgggattatgagcccggaaatggacccttactggctgctgaaagagctggatcaattcccgacgcgtccgcaggaccgctttgctatcagcgaagaagataaacgtatctaccgtgaagagttgttcccgtactgggaaaaacgtagcatgaaagatttcatcaacgggcagatgacagatgaagtaaaagccgcgaccaacacgcagattttcagcatcaaccagacggataaaggccaggggcacattattattgattacccacgcctgttgaatcacgggctgggtgagctggtggcacagatgcagcaacattgtcagcaacagccggagaatcacttttatcaggccgcgttgttactgctggaagccagccagaaacacattttgcgttacgccgaactggcggaaacgatggcggcaaactgcacagatgcccagcgtcgcgaagagctgctgactattgcagagatctcccgccataacgcgcaacataagccgcagacgttctggcaggcgtgccagttattctggtacatgaacatcattctgcaatacgaatccaacgccagtagcctaagcttggggcgcttcgaccagtatatgttgccgttctatcagacaagtttaacccagggcgaagatgcggcgttcctgaaagaactgctcgaatctttatgggtgaaatgcaacgacatcgtgctgttgcgctccaccagtagcgcgcgttatttcgccggtttcccgaccggctataccgcactgctcggcgggttaaccgagaacggacgtagcgcggtgaacgtgcttagcttcctttgccttgacgcctatcaaagcgtgcaattaccgcaaccgaacctcggcgtgcgcactaacgccttgatcgacacgccgttcctgatgaaaaccgccgaaaccattcgcttcggtaccggtattccgcaaatctttaacgatgaagtggtggtgccagcgttcctcaaccgtggcgttagcctggaagatgcgcgcgactattccgtagtgggctgtgtggaattatctattcccggcagaacctacggcttgcatgacatcgcgatgtttaatctgctgaaagtgatggaaatctgcctgcatgaaaatgaaggcaatgctgcgctgacttatgaaggtttactggagcagatccgcgccaagatcagccactacatcaccctgatggttgagggcagcaatatttgtgatatcggccatcgcgactgggcacctgtaccgctgctcagtagctttatcagcgattgtctggaaaaaggccgcgatattaccgatggcggcgcgcgttataacttctccggcgtacaggggatcggtatcgccaacctgagcgattctctccatgcgttgaaagggatggtttttgagcaacagcgtttaagttttgacgaattgctgagcgtattaaaagccaacttcgcaacgccagaaggcgaaaaagtccgcgctcgcttaattaaccgcttcgagaaatacggtaacgatatcgacgaggtggataacatcagcgccgaactgttgcgccactactgcaaagaagtggaaaaataccagaacccgcgcggcggctacttcacgccgggaagctataccgtttctgctcacgtcccgttgggaagcgtggttggcgcgacgccagacggtcgttttgccggagaacagctggcagacggcggcttgagtcccatgctgggccaggacgcacaagggccaacagcggtactgaagagtgtcagtaagctcgataacacgctgctgtctaacggtacgttgctgaacgtgaaattcactccggcgaccctggaaggtgaagcaggattacgcaaactggccgacttcttacgggcgtttacccagcttaagttacaacatattcagtttaacgtggtgaacgccgacacgttgcgggaagcgcaacagcgcccacaagattatgccgggctggtggtgcgcgttgccggatacagcgccttctttgtcgaactgagcaaggagatccaggatgacatcatccgccggacagcgcatcagctgtaattaaactgtcgaaggagatccaggatgacaagttccgccggacagcgcatcagctgtaacgttgtggaaacgcgccgcgatgatgtggcgcgcattttcaacattcagcgttatagtctgaatgacggcgagggcattcgtacggtggtcttttttaaaggctgtccgcatctttgcccgtggtgtgctaatccggagagcatctccggcaaaatccagacggtacgcagagaggcgaaatgtctgcactgtgcgaaatgtttgcgtgatgcggatgaatgcccctccggggcgtttgaacggattggtcgcgatatcagccttgacgctctggaacgggaagtgatgaaagatgacattttctttcgcacgtccggcggcggcgtcacgctttctggcggcgaagtgttaatgcaggcggagtttgctacccgttttttacagcgactgcggctgtggggtgtgagttgcgccattgaaactgccggagacgcaccagccagcaagctattaccgctggcgaaattgtgcgatgaagtgttgttcgatttaaaaattatggacgcgactcaggcgcgggatgtggtgaagatgaacctgccacgcgtgctggagaatctgcgtttgctggtgagtgagggcgtcaacgtgatcccgcgtttaccgctgatccctggtttcacgctcagccgggagaatatgcagcaggcgctggatgtactgatcccgctgaatatcaggcagatccatctgttaccgtttcatcagtacggcgaaccgaaataccgcctgctggggaaaacatggagcatgaaagaggtgcctgcgccgagcagtgctgatgtggcaacgatgcgcgaaatggcagaacgggccggacttcaggttaccgtgggaggttaaaatggcatacctggtggcagtaaccgcctgcgtaagcggcgtggcgcatacttatatggcggcggaacggctggaaaagttgtgcctgttagagaagtggggagtcagcattgaaactcagggcgcgctgggaacggagaatcgtttagcggatgaggatatccgccgggcggatgttgctctgttgattacggatatcgagcttgccggtgccgagcgatttgaacattgccgctatgtgcaatgcagcatctacgcattcctgcgtgagccgcagcgggtaatgagcgcggtgcgcaaagtgctttctgcgccgcagcaaacccatcttattctggagtaattattctggagtagtcggtttttctgtcagttggctgtggtactgccggcgatattcgctcgggctgcgttcggtgtttttacgaaacagacggcagaagtagttgctgtcgacaaagccgcaggcgtgcgccacttcttttaccttcaggtcatagcctttcaataacgtcttagcgtgctccagtcgcgtgtgattcaggtattcgttaaaaccaatggcccccgttttttgaaacaggtggctgaggtaatttgggctaatataaaacgcctgtgcaacagattcgcgggtaagcgcggaggcatagcgttcgtcgatataatcgcgaatagcttcaaatagtgcctggctgcgactggcggtctggatttggctgccaagcaaatcgcggcagtggctaagcaggctggcgacgataagccttgccgtttgctgctcctgcggctgcatttgcatttcattgagcgtttgtagcagaaaagaacctatgcgtgggccgcgtcgggcgacgtgttgcttcgccagattttgatattgtttgccatcccattgcacgacgctgaagccgagttgctgtttgccaaacagcacgctaaaggtagtagcgggggcttgccattgtggaaaattccagccaccagcaggaacgtacagcacatcgccgggaactaacgttgctccagcgccggtatcaacaaactcaccttccagcacaatttccagccgtggaaaatcgacctgatacgcaagatcgggcaccgggccgttactgctggcaaagtaaatctggcgcagggacagcgggccgttgatcaggcgggagagcagatagctgacgtcgtgatacatgttattcccttaggtatgtagacgggaaaacagtaactggcattattaaaaaaggccacctgaaaagtgtggcctgaggggagttcgatgtaaacattgcggcagttgtattgccggatgtggcgtaaacgccttatccagcctaccgccgcgatctgtaggccggataagacgcgtcaagcgtcgcatccggcaaatagcgcctggctgataattactgattacccacctgatcgccatagggcagtgtgtcgtaatcgatcagtgcgtttttcttatacgggttaccaatccagcgggtagtttctttgaactgcggattcaccacactacgggttggatcgtaaccgtcgtaagataagcccgccaaatcactccaggtgtggatcagttccgccaggctgtatttacgatcaacatcctggctgaaatcacggggatgagtcgcttgccatttttcactcgtccacagcaggaacggaatggtgtacatatgacgcgtcgggttgtcctcattacgcccctgagttttgtgcggcggcgtgtcgtaaacctcttcaccgtggtcagagaaataaaccaggaaaccgttcgggtttgctgctttaaagtctttaatcaggctggcaaccacatgatcgttatacaggttagcgttgtcataatcgttataactctccagctcttccgcgtttaatcccggcggaacatgatcggtattgccatcaaacttgccctgattttccgggtagcggtatttgtatttgatatgcgtacccagcagatgaacaatgatcagtttcttcggcgcagggtcattcagcacttcctggaacggcttcagcacgttggtgtcgtattcacgcgcactctgcgtacgttgctggttcatgtagtactgcttgtcggtctggcggctaaataccgtcagcatggtattgcgggcggtcatcgtctgctggttggtgatccagaaggttttataacccgcctgtttcatcatgttcatcaggctcggctgcgtcagatacagatccgggttcttttcattggcaaaggtcagcgcctgttgcaggatttcaatggtgtacggacgagacgtaactacgttattaaacacggtcagattcggatcggttttatgcagcgcatccagctccggcgtggtttcacgcggataaccgtacagactcatgcgtccgcgctgggtgctctcgccaatcaccagcactaaagtgcgcggttcgttaccgctttcatctttgaaattagccagtggcggcaaggcattattttcattcagtaactttgttaggctgtttagttgctgacgatactgataatagccggtcaggaattgccacggtgcggcaggctccatacggctggccaggttatccaacgttttctcaaacggcttgtttttgataaacgtattcatggcgatcggatgcagaatcaagccataaagcagggcaaaagagacaacataacgccacggctttggaatatagaccgggcgcaggcgtgtccacagcagaactgccaccgccgtataggccagcgcgataagcacaattttcaggctgaaatactggcttaaatactcgctggcttcgttggtgttggtttcgaacatcacaaacagaacgctctggctgaactcctgaccgtagatgacgtagtagcacagcgccgccagagaggccgcccatagcaccacgccgattactgcggcaataattttaatccgcttcggaaagaggaataccgggatcaaccacaggctactgaataacaggctgtcgcgaatgccgttagtgccactataaccactgatgtaaataatggcctgtagcagagtagagaaaaaccaaaagtagagcagtgcccaacccagggctttccagctaaaaagaggtttagcctggacttctgtggaatgcatagtaagaacctgtcttgaaaaaatatcgccgaatgtaacgacaattccttaaggatatctgaaggtatattcagaatttgaataaaatgcagacagaaatatattgaaaacgagggtgttagaacagaagtatttcagaaaaccctcgcgcaaaagcacgagggtttgcagaagaggaagattagccggtattacgcatacctgccgcaatcccggcaatagtgaccattaacgcttgttcgacgcgaggatccggttcctggccttctttttctgcctggcgggagcggtgcagcaactcggcctgcaatacgttcagcgggtcggtgtaaatattccgtagctgaatagactctgcaatccacggcagatcggccatcagatgggaatcgttggcaatcgccagcaccactttgatgtcttcttcttgcaggttgcgtaactctttacctaacggccacagtgctttgtctaccaggcgttggtcatagtattccgccagccacaggtctgctttggcgaagaccatctccagcatgccgagacgcgtgctgaagaatggccaatcgcggcacatagcctccagctcgctctgtttgccgtcttcgaccactttttgcagcgccgtacctgcacccagccaggcggggagcatcagacggttttgcgtccaggcgaagatccacggaatggcgcgtagactctcgacgccgccggttgggcgacgtttcgccggacgactacccaacggcagtttgcccagttcttgttccggcgtagcggagcggaagtaaggcacaaaatctttgttttcacgtacgtagccgcggtagacatcgcaggagatgacactcagttcatccataatgcgacgccagctctctttcggctccggcggtggcagcaggttggcttccagaatcgccccggtataaaggctcaggctgctgacggtgatttctggcagaccatatttaaagcggatcatctcgccctgttcggttacgcgcaggccgcctttcaggcttcctggcggttgactcagcagcgccgcatgagcaggtgcgccgccgcgaccaatggaaccgccgcgaccgtggaacaacgtcagctcaatacccgctttttcgcaggttttgattaatgcatcctgtgcctgatattgcgcccaggaagctgccatcactcccgcatcttttgcactgtcggaatagccaatcatcaccatctgtttgccctgaatcaggccacgataccagtcaatattgagcagctgggtcatgacatcgttggcgttgttcagatcatcgagggtttcaaacagcggagcaaccggcatcgcaaacccgatacccgcttctttcagcagcaggtggacagccagtacgtcggacggcgttttcgccatgctgatcacgtaggcggcaatggagccttgcggtgcttcggcaatcacctggcaggtatcgagcacttcgcgcgtttcggcgcttggttgccagttgcgcggcagaagcggacgtttggagttcagttcgcggatcaggaacgcctgtttgtcggcctcactccagctttcgtagtcgccgataccgaggtagcgggtcagctcgcccagcgcttcggtatgacgcgtgctctcctgacggatatcaatacggaccagcggtacgccgaaacatttcacgcggcgcagggtgtcgagcagatcgccgttggcgataatacccatgccacacgcctgaagactctggtagcaagcgtagagcggttcccacagttcttcgttttgtgtcagcaggccttctggttttggcagttcttcgcctttcaggcgcgcttccagccatgcctgtgtcgccatcaggcgagaacgcaggtttttcatcagatagcgatacggttctgcggcaccttcttcgccaaccagcgccagcagttcaggggtcgcttcaaccatgctcagttcagaaaccagcacctgaatatctttcaggaacaaatcggtggctttccagcggctgagtagcaggacgtggcgggtgatatcggcagtgacgttcgggttgccgtcgcggtcgccgcccatccagctagtaaaacggaccggaacaaattcgacgggcagtttgtagccgaggttctcttccagttgttcgttcagttcgcgcaggtaatttggtacgccttgccacaggctgttttccactacggcaaagccccatttggcttcatctaccgggcttggacgcagcttacggatttcatcggtatgccaactctgggcgatcaactggcgcaggcgacgcatcagctggttgtgttcgtagtcagcgatatctttgttatcgagctgttttaaacaggcgttcacttccaccattttgtggatcagtgtacgacgggtaatttcggttgggtgagccgtgaggaccagttccaggctcaggctttccactgcttttttgatggtgtcttcgctcagttccggctggtttttcagtttacgcagggtgcgggcgatcacttccgggttgctggcagcttcgcctttcgggctaatgctgtggtattgctcggcggtgttggccaggttcaggaactgactaaacgcacgcgcaacgggcagcagctcgtcgttgctcaaattttgtaaggtggtgagcaactcctggcggttagcatcattgccagcgcgactagatttgctcaacttacggatagtttctacgcgttcaagaatgtgttctcccaacgcatccttgatggtttctcccagcactttgccgagcatactgacattactacgcaatgcggaatattgttcgttcatattaccccagacaccccatcttatcgtttgatagccctgtatccttcacgtcgcattggcgcgaatatgctcgggctttgcttttcgtcgtcttttataaagccacgtaaaagcggtgacgtcaaatgctgcgaaatcgcttcagcaaacgaataaatagcaggaatttacgtcattaaattcacgacgctttaaataagcgtaacttatggaaatgttaaaaaatcgccccaagtaacaccaaaggtgtaggtcggataagatgcgcaagtatcgcatccgacattattgcggcactggagtttggcaacagtgccggatgcggcgcgagcgccttatccggcctacagttgggcatcgtttgagtcactgtcggtcggataagatgcgcaagtatcgcatccgacattattgcggcactggagtttggcaacagtgccggatgcggcgcgagcgccttatccggcctacggttgggcatcgtttgagtcactgtaggtcggataagatgcgcaagcatcgcatccgacattattgcggcactggagtttggcaacagcgccggatgcggcgcgagcgccttatccggcctacgttttaatgccagcaaaaatggtgaattacctgggttatcagttcgcgggtgggcttgataaaccgtgtttccagatattcatcaggttgatgagcctgattaatactgccaggccccaacaccagcgtcgggcataacgtttgaataaacggcgcttcggtacagtagttcaccacttcggtttttgctccgagcaatttctcaaccacttcaaccagttgatgattcggtgggcattcatagccagggatcggcggatgcagctcgtcgaccgtcagacgacccggccagcgttcgctcaccggagccaatgcatcgttgagcaaaccattaagttcattgagtgtcatgccaggcagcggacgaatatccatatgcaactcacagcaagcgcaaatacggttagaagcgtcgccaccgtgaatatgcccgaggttgagcgtagggtatggcacggtaaacgcttcgtagtgataacgttctttcaggttatcgcgcaattgcaaaatatgcccgatggcgtcgtgcattagttcgatagcgttaactccgcgtgctggatcgctggagtgcccgctctggccctgaatacggatggcgttagagatatgacctttatgtgcgcgtaccggttgtagactcgtcggttcgccaatgatggcgcaatccgggcgcagggcggtagtttcggcaaaataacgcgctccggccatactggtttcttcatcagcagtcgccagaatgtagagcggttttttcagtttcgtgacgtcgacatcgcgtagcgcatcaaggataaacgcaaaaaagcctttcatgtcggcggtgcctaagccgtaaagcttgccgtcatgctccgtcagtgtaaacggatcgcgcgtccagcgaccgtcatcaaatggcaccgtatcggtatgccccgccagcaacaagccgccagccccctgtccgatacttgccagcatattgaatttgttgcgagttcctggaacaggctgcacttccacattgaagcccaaatctttaaaccagtccgccagcagagtgattaaatctgcattgctttgatcgagtgcctcttccgtggcgcttatactaggtgtggcaatcagagcgcggtaaatctcgataaatggcggtaatttgtttttcattgttgacacacctctggtcatgatagtatcaatattcatgcagtatttatgaataaaaatacactaacgttgagcgtaataaaacccaccagccgtaaggtgaatgttttacgtttaacctggcaaccagacataagaaggtgaatagccccgatgttgaatacgctgattgtgggtgccagcggctacgctggcgcagagctagtgacctatgtaaatcgccatccgcatatgaacataaccgctttgactgttagtgcgcaaagcaatgatgcgggaaagttaatctccgatttgcatccgcagctaaaaggcatcgttgatctgccgttgcagccgatgagcgatatcagcgagtttagcccaggggtggacgtagtgtttctcgccaccgcccatgaagttagccacgatttagcgccgcagtttcttgaagcgggctgcgtggtgttcgacctttccggcgcgtttcgtgttaacgacgccaccttctatgaaaaatattacggctttacccatcaatacccggaactgttggaacaggcagcctacggtctggcggagtggtgcggtaataaattaaaagaagcgaatttgattgcggtgccgggctgttatccgacggcggcacagctggcgctgaaaccgttgattgatgccgatcttcttgacctcaatcagtggccggtgatcaacgccaccagcggcgtgagcggtgcagggcgtaaagcggccattagtaacagcttttgtgaagttagcctgcaaccgtatggcgtctttactcatcgccatcaaccagagatcgccacacacctcggtgctgacgttatcttcaccccacatctgggcaatttcccgcgcggcattctcgaaaccattacctgccgcctgaaaagcggtgtgacccaggcgcaagtcgcgcaagtgttacagcaggcgtatgcccataaaccgctggtgcggctgtatgacaaaggcgttccggcgctgaaaaatgtcgttgggctgccattttgcgatatcgggtttgccgttcagggcgagcatctgattattgtggcgaccgaagacaacttactgaaaggcgcggcggcacaagcggtacagtgcgccaatattcgtttcggctatgcggaaacgcagtctcttatttaagggtgcaatgatgaatccattaattatcaaactgggcggcgtactgctggatagtgaagaggcgctggaacgtctgtttagcgcactggtgaattatcgtgagagtcatcagcgtccgctggtgattgtgcacggcggcggttgcgtggtggatgagctgatgaaagggctgaatctgccggtgaaaaagaaaaacggcctgcgggtgacgcctgctgatcagatagacattatcaccggagcactggcgggaacggcaaataaaaccctgttggcatgggcgaagaaacatcagattgcggccgtaggtttgtttctcggtgacggcgacagcgtcaaagtgacccagcttgatgaagagttaggtcatgttggactggcgcagccaggtagccctaagcttatcaactccttgctggagaacggttatctgccggtggtcagctccattggcgtaacagacgaagggcaactgatgaacgtcaatgccgaccaggcggcaacggcgctggcggcaacgctgggcgcggatctgattttgctctccgacgtcagcggcattctcgacggcaaagggcaacgcattgccgaaatgaccgccgcgaaagcagaacaactgattgagcagggcattattactgacggcatgatagtgaaagtgaacgcggcgctggatgcggcccgcacgctgggccgtccggtagatatcgcctcctggcgtcatgcggagcagcttccggcactgtttaacggtatgccgatgggtacgcggattttagcttaagttttgttggccggaggcgcagctttccggcattgaatttcaaaataaggaaacagagttatggcactttggggcgggcgttttacccaggcagcagatcaacggttcaaacaattcaacgacagtctgcgctttgattaccgtctggcggagcaggatattgttggctctgtggcctggtccaaagccctggtcacggtaggcgtgttaaccgcagaagagcaggcgcaactggaagaggcgctgaacgtgttgctggaagatgttcgcgccaggccacaacaaatccttgaaagcgacgccgaagatatccatagctgggtggaaggcaaactgatcgacaaagtgggccagttaggcaaaaagctgcataccgggcgtagccgtaatgatcaggtagcgactgacctgaaactgtggtgcaaagataccgttagcgagttactgacggctaaccggcagctgcaaagcgcgctggtggaaaccgcacaaaacaatcaggacgcggtaatgccaggttacactcacctgcaacgcgcccagccggtgacgttcgcgcactggtgcctggcctatgttgagatgctggcgcgtgatgaaagccgtttgcaggatgcgcttaagcgtctggatgtcagcccgctaggctgtggcgcgctggcgggaacggcctatgaaatcgaccgtgaacagttagcaggctggctgggctttgctagcgcgacccgtaacagtctcgacagcgtttctgaccgtgaccatgtgttggaactgctttctgctgccgctatcggcatggtgcatctgagccgttttgctgaagatctgattttctttaacaccggcgaagcggggtttgtggagctttctgaccgcgtgacttccggtagtagtttaatgccgcagaagaaaaacccggatgcgctggagctgattcgcggtaaatgcggccgggtgcagggggcgttaaccggcatgatgatgacgctgaaaggtttgccgctggcttacaacaaagatatgcaggaagacaaagaaggtctgttcgacgcgctcgatacctggctggactgcctgcatatggcggcgctggtgctggacggcattcaggtgaaacgtccacgttgccaggaagcggctcagcagggttacgccaacgccaccgaactggcggattatctggtggcgaaaggcgtaccgttccgcgaggcgcaccatattgttggtgaagcggtggtggaagccattcgtcagggcaaaccgctggaagatctgccgctcagtgagttgcagaaattcagtcaggtgattgacgaagatgtctatccgattctgagcctgcaaagctgcctcgacaagcgtgcggcaaaaggcggcgtcagtccgcagcaggtggcgcaggcgattgcttttgcgcaggctcggttagggtaagaacatttatatgtataaatttgagcctggcttatcgccgggcttttttatggcaaaaaaaagcggatcctggagatccgcaaaagttcacgttggctttagttattcgagttgagaaactctcgaaacgggcagtgacttcaagggttaaaagaggtgccgctccgtttctgtgagcaattatcagtcagaatgcttgatagggataatcgttcattgctattctacctatcgccatgaactatcgtggcgatggaggatggataatgaatattcgtgatcttgagtacctggtggcattggctgaacaccgccattttcggcgtgcggcagattcctgccacgttagccagccgacgcttagcgggcaaattcgtaagctggaagatgagctgggcgtgatgttgctggagcggaccagccgtaaagtgttgttcacccaggcgggaatgctgctggtggatcaggcgcgtaccgtgctgcgtgaggtgaaagtccttaaagagatggcaagccagcagggcgagacgatgtccggaccgctgcacattggtttgattcccacagttggaccgtacctgctaccgcatattatccctatgctgcaccagacctttccaaagctggaaatgtatctgcatgaagcacagacccaccagttactggcgcaactggacagcggcaaactcgattgcgtgatcctcgcgctggtgaaagagagcgaagcattcattgaagtgccgttgtttgatgagccaatgttgctggctatctatgaagatcacccgtgggcgaaccgcgaatgcgtaccgatggccgatctggcaggggaaaaactgctgatgctggaagatggtcactgtttgcgcgatcaggcaatgggtttctgttttgaagccggggcggatgaagatacacacttccgcgcgaccagcctggaaactctgcgcaacatggtggcggcaggtagcgggatcactttactgccagcgctggctgtgccgccggagcgcaaacgcgatggggttgtttatctgccgtgcattaagccggaaccacgccgcactattggcctggtttatcgtcctggcagtccgctgcgcagccgctatgagcagctggcagaggccatccgcgcaagaatggatggccatttcgataaagttttaaaacaggcggtttaaaccgtttaacgcagctacccgataggcttccgccatcgtcgggtagttaaaggtggtgttgacgaagtactcaatagtgttgccgccacctttctgttccataatcgcctgaccgatatgaataatttcggcagcgcgctcgccaaagcagtgaatacccagaatctcttttgtttcccgatggaacaaaattttcagcgtgcccacgttcatgccgacgatttgtgcgcgtgccagatgtttaaactgggcgcggcccacttcatatggcactttcattgcggtcagctgctgttcggttttgcccacagagctgatttccgggatggtgtaaataccggtagggatatcttcaatcagatgtgcggtggcttcgccttttaccagcgcctgcgcggcaatgcgcccctggtcataggccgcgctcgccaggctcggataaccaatcacgtcgcccaccgcgtaaacgtgtggctgtgcggtctgatacatgctgttgaccttcagctgtccgcggctgtcagtttctagcccaatgttctgtaacgccaggctatcggtattaccggtgcgaccgttggcatagagcaggcagtcagctttcagttttttaccgctcttcagatgcatgatcacaccatcgtcacagccttcgatcttctcgtactcttcgttgtgacgaatcactacgccactgttccagaagtgataggagagagaatcactcatctcttgatcgagaaatgccagcaggcgatcgcgggtgttgatcagatccacttttacatccataccgcggaagatgctcgcatattcacagccgatcactccagcaccatagataagtacatggcgcggttcgtggtgcatgctgagaatactgtcgctgtcgtaaatgcgtggatgggtgaaatcaacatctgttggatgatatggacgagagccgcaggcaataacaaatttttcagcggttagtgtttcaacgctgccgtccgggcaatccagcgccaacgtatgctcgtcaacaaagcgagcgtttccctgcaatatttcacagtgattacgttcgtaaaatccctgacgcatgcgcgtttgttgattaatcacgttatcggcatggttaaggatatcggcaaaagaagagcggagcagtcgggaatggtcgctgtaaagtgggttttgattgaattctataatgcggctgacggcgtgacggagagctttgctcgggatggtgccccagtgggtgcaaccgccgccaacattttgataacgctcgataactgcgacgcgcgcaccttgcttaaccaggcccattgcagcgccttcgccgccggggccggaacctattactatggcatcgtaatcgtaggaatgtggcatggtagggcttacctgttcttatacataaaagcaacagaatggtaacattttatcgcgggtaagccaattgatccccgtcatttatctggctatatcctgagcggcctttgctttgtctgtttcttacttttgccctgacgttttattggatttttatcgacgatactctccgtttaagcggcaggtttccgctgtacgtaaaagaaccggccaaagaattgcagtaaatatgttttattgcgttaccgttcattcacaatactggagcaatccagtatgttcattctctggtatagtgccagcagtacttttggcaaggatagtgacatcgtgatgggcgtaagagcgcaacaaaaagaaaaaacccgccgtagcctggtggaagccgcatttagccaattaagtgctgaacgcagcttcgccagcctgagtttgcgtgaagtggcgcgtgaagcgggcattgctcccacctctttttatcggcatttccgcgacgtagacgaactgggtctgaccatggttgatgagagcggtttaatgctacgccaactcatgcgccaggcgcgtcagcgtatcgccaaaggcgggagtgtgatccgcaccagcgtctccacatttatggagttcatcggtaataatcctaacgccttccggttattattgcgggaacgctccggcacctccgctgcgtttcgtgccgccgttgcgcgtgaaattcagcacttcattgcggaacttgcggactatctggaactcgaaaaccatatgccgcgtgcgtttactgaagcgcaagccgaagcaatggtgacaattgtcttcagtgcgggtgccgaggcgttggacgtcggcgtcgaacaacgtcggcaattagaagagcgactggtactgcaactgcgaatgattagcaaaggggcttattactggtatcgccgtgaacaagagaaaaccgcaattattccgggaaatgtgaaggacgagtaatgaaacaagcaaatcaagatagaggtacgctgctgctggcgttagttgctggcttaagcattaatggtactttcgcagcgctgtttagctccattgtgccattttctgtattcccgattatttccctggtgctgacggtttactgcctgcatcaacgttatcttaatcgcactatgccggtaggcttgccgggtctggcagctgcctgttttattctcggcgtactgctgtacagcacggtagttcgtgcggaatatccggatatcggctctaacttcttcccggcagtactctccgtcattatggtgttctggattggcgcgaagatgcgtaaccgtaagcaggaagttgctgagtaatcggtattatgccggatgctggcgcatccggcatgggttttacttcgcggtcagtaatacgccgcactccatatggtgcgtgtaggggaactgatcaaacagagccagacgttcgaccttgtgcgtctggcttaatgtttccagattcttgcataacgtttccgggttacaggagatgtacaaaatacgcggatacgcctgcaccattttctcggtttcactgtccagaccgctgcgcggagggtcgacaaaaatggtttcgcactgataactctttaagtcgatcccttgcaggcggttaaactcgcgcacaccattcatcgcctgagtaaattcttctgccgccatacgaataatttgtacgttatcaatatggttagctgcgatgttgtattgcgcagcagcaacgctcggcttagcgatttcggtggctaatacccgatcaaaattacgcgccagcgctaaactaaagttaccgttgccgcagtacagctccagtaaatcgcctttactgcctttggttacgtccagcgcccattccagcatctgaatattcatcgccgcgttcggctgggtaaagctgttttctacctgacggtagatcatctctttccctgcgaccggcagacgttcatcgatgtaatcctgatccagctcgattttggttttcgttgcccgaccaatcagatgcacattcagattctgcgcgcgcagtgcatcgcgcagggcctccgcttcctgacgccactcatcatccagcttcttatggtatagcagggaaaccaccgcctgattactcagtgtagtgaggtaatcaatctggaacaacttgtggcgcagaacgggattattacgcacacccgcaatcatcgccgtcatcaactggttgataagttcactggcggcggggaagctatccacgcggatgcggcttttggtttgttgatcgaaaatgatgtgatacaggtcatcgccatcgtgccagatgcggaactccgcgcgcatccggtaatgactgaccgggctgcgaaacacttccggaaccaggtcagaaaacggtgccatcatactttgcaaacgtaccactttttcggctaactgcgcttcatactgttctgttggaaggtgttcgggggtcatgatgtatcctgaaaaattaaagtacgcggcgattgtagggattgctcatcagatgtccagatcttgatgaattcctatttgtgagctacgtctggacagtaacttgttacaacctgtagcatccacttgccggtcctgtgagttaatagggaatccagtgcgaatctggagctgacgcgcagcggtaaggaaaggtgcgatgattgcgttatgcggacactgccattcggtgggaagtcatcatctcttagtatcttagatacccctccaagcccgaagacctgccggccaacgtcgcatctggttctcatcatcgcgtaatattgatgaaacctgcggcatccttcttctattgtggatgctttacaatgattaaaaaagctagcctgctgacggcgtgttccgtcacggcattttccgcttgggcacaggataccagcccggatactctcgtcgttactgctaaccgttttgaacagccgcgcagcactgtgcttgcaccaaccaccgttgtgacccgtcaggatatcgaccgctggcagagcaccagcgtcaatgatgtgctgcgccgtcttccgggcgtcgatatcacccaaaacggcggtagtggtcagctcagttctatttttattcgcggtacaaatgccagtcatgtgttggtgttaattgatggcgtacgcctgaatctggcgggggtgagtggttctgccgaccttagccagttccctattgcgcttgtccagcgtgttgaatatatccgtgggccgcgctccgctgtttatggttccgatgcaataggcggggtggtgaatatcatcacgacgcgcgatgaacccggaacggaaattagtgcagggtggggaagcaatagttatcagaactatgatgtctctacgcagcaacaactgggggataagacacgggtaacgctgttgggcgattatgcccatactcatggttatgatgttgttgcctatggtaataccggaacgcaagcgcagacagataacgatggttttttaagtaaaacgctttatggcgcgctggagcataactttactgatgcctggagcggctttgtgcgcggctatggctatgataaccgtaccaattatgacgcgtattattctcccggtagtccgttgctcgatacccgtaaactctatagccaaagttgggacgccgggctgcgctataacggcgaactgattaaaagtcaactcattaccagctatagccatagcaaagattacaactacgatccccattatggtcgttatgatagcagcgcgacgctcgatgagatgaagcaatacaccgtccagtgggcaaacaatgtcatcgttggtcacggtagtattggtgcgggtgtcgactggcagaaacagactacgacgccgggtacaggttatgttgaggatggatatgatcaacgtaataccggcatctatctgaccgggctgcaacaagtcggcgattttacctttgaaggcgcagcacgcagtgacgataacagtcagtttggtcgtcatggaacctggcaaaccagcgccggttgggaattcatcgaaggttatcgcttcattgcttcctacgggacatcttataaggcaccaaatctggggcaactgtatggcttctacggaaatccgaatctggacccggagaaaagcaaacagtgggaaggcgcgtttgaaggcttaaccgctggggtgaactggcgtatttccggatatcgtaacgatgtcagtgacttgatcgattatgatgatcacaccctgaaatattacaacgaagggaaagcgcggattaagggcgtcgaggcgaccgccaattttgataccggaccactgacgcatactgtgagttatgattatgtcgatgcgcgcaatgcgattaccgacacgccgttgttacgccgtgctaaacagcaggtgaaataccagctcgactggcagttgtatgacttcgactggggtattacttatcagtatttaggcactcgctatgataaggattacagttcttatccttatcaaaccgttaaaatgggcggtgtgagcttgtgggatcttgcggttgcgtatccggtcacctctcacctgacagttcgtggtaaaatagccaacctgttcgacaaagattatgagacagtctatggctaccaaactgcaggacgggaatacaccttgtctggcagctacaccttctgaaccacgtcccaccgtgctggtgtttgactccggcgtcggtgggttgagcgtctatgacgagatccggcatctcttaccggatctccattacatttatgctttcgataacgtcgctttcccgtatggcgaaaaaagcgaagcgtttattgttgagcgagtggtggcaattgtcaccgcggtgcaagaacgttatccccttgcgctggctgtggtcgcttgcaacactgccagtaccgttagtcttcctgcattacgcgaaaagttcgacttcccggttgttggtgtcgtgccggcgattaaacctgctgcacgtctgacggcaaatggcattgtcggattactggcaacccgcggaacagttaaacgttcttatactcatgagctgatcgcgcgtttcgctaatgaatgccagatagaaatgctgggcagcgcagagatggttgagttggctgaagcgaagctacatggcgaagatgtttctctggatgcactaaaacgtatcctacgcccgtggttaagaatgaaagagccgccagataccgttgtattgggttgcacccatttccctctactacaagaagaactgttacaagtgctgccagagggaacccggctggtggattctggcgcagcgattgctcgccgaacggcctggttgttagaacatgaagccccggatgcaaaatctgccgatgcgaatattgccttttgtatggcaatgacgccaggagctgaacaattattgcccgttttacagcgttacggcttcgaaacgctcgaaaaactggcagttttaggctgatttggttgaatgttgcgcggtcagaaaattattttaaatttcctcttgtcaggccggaataactccccataatgcgccaccactgacacggaacaacggcaaacacgccgccgggtcagcggggttctcctgagaactccggcagagaaagcaaaaataaatgcttgactctgtagcgggaaggcgtattatgcacaccccgcgccgctgagaaaaagcgaagcggcactgctctttaacaatttatcagacaatctgtgtgggcactcgaagatacggattcttaacgtcgcaagacgaaaaatgaataccaagtctcaagagtgaacacgtaattcattacgaagtttaattctttgagcgtcaaacttttaaattgaagagtttgatcatggctcagattgaacgctggcggcaggcctaacacatgcaagtcgaacggtaacaggaagaagcttgcttctttgctgacgagtggcggacgggtgagtaatgtctgggaaactgcctgatggagggggataactactggaaacggtagctaataccgcataacgtcgcaagaccaaagagggggaccttcgggcctcttgccatcggatgtgcccagatgggattagctagtaggtggggtaacggctcacctaggcgacgatccctagctggtctgagaggatgaccagccacactggaactgagacacggtccagactcctacgggaggcagcagtggggaatattgcacaatgggcgcaagcctgatgcagccatgccgcgtgtatgaagaaggccttcgggttgtaaagtactttcagcggggaggaagggagtaaagttaatacctttgctcattgacgttacccgcagaagaagcaccggctaactccgtgccagcagccgcggtaatacggagggtgcaagcgttaatcggaattactgggcgtaaagcgcacgcaggcggtttgttaagtcagatgtgaaatccccgggctcaacctgggaactgcatctgatactggcaagcttgagtctcgtagaggggggtagaattccaggtgtagcggtgaaatgcgtagagatctggaggaataccggtggcgaaggcggccccctggacgaagactgacgctcaggtgcgaaagcgtggggagcaaacaggattagataccctggtagtccacgccgtaaacgatgtcgacttggaggttgtgcccttgaggcgtggcttccggagctaacgcgttaagtcgaccgcctggggagtacggccgcaaggttaaaactcaaatgaattgacgggggcccgcacaagcggtggagcatgtggtttaattcgatgcaacgcgaagaaccttacctggtcttgacatccacggaagttttcagagatgagaatgtgccttcgggaaccgtgagacaggtgctgcatggctgtcgtcagctcgtgttgtgaaatgttgggttaagtcccgcaacgagcgcaacccttatcctttgttgccagcggtccggccgggaactcaaaggagactgccagtgataaactggaggaaggtggggatgacgtcaagtcatcatggcccttacgaccagggctacacacgtgctacaatggcgcatacaaagagaagcgacctcgcgagagcaagcggacctcataaagtgcgtcgtagtccggattggagtctgcaactcgactccatgaagtcggaatcgctagtaatcgtggatcagaatgccacggtgaatacgttcccgggccttgtacacaccgcccgtcacaccatgggagtgggttgcaaaagaagtaggtagcttaaccttcgggagggcgcttaccactttgtgattcatgactggggtgaagtcgtaacaaggtaaccgtaggggaacctgcggttggatcacctccttaccttaaagaagcgtactttgtagtgctcacacagattgtctgatagaaagtgaaaagcaaggcgtttacgcgttgggagtgaggctgaagagaataaggccgttcgctttctattaatgaaagctcaccctacacgaaaatatcacgcaacgcgtgataagcaattttcgtgtccccttcgtctagaggcccaggacaccgccctttcacggcggtaacaggggttcgaatcccctaggggacgccacttgctggtttgtgagtgaaagtcgccgaccttaatatctcaaaactcatcttcgggtgatgtttgagatatttgctctttaaaaatctggatcaagctgaaaattgaaacactgaacaacgagagttgttcgtgagtctctcaaattttcgcaacacgatgatgaatcgaaagaaacatcttcgggttgtgaggttaagcgactaagcgtacacggtggatgccctggcagtcagaggcgatgaaggacgtgctaatctgcgataagcgtcggtaaggtgatatgaaccgttataaccggcgatttccgaatggggaaacccagtgtgtttcgacacactatcattaactgaatccataggttaatgaggcgaaccgggggaactgaaacatctaagtaccccgaggaaaagaaatcaaccgagattcccccagtagcggcgagcgaacggggagcagcccagagcctgaatcagtgtgtgtgttagtggaagcgtctggaaaggcgcgcgatacagggtgacagccccgtacacaaaaatgcacatgctgtgagctcgatgagtagggcgggacacgtggtatcctgtctgaatatggggggaccatcctccaaggctaaatactcctgactgaccgatagtgaaccagtaccgtgagggaaaggcgaaaagaaccccggcgaggggagtgaaaaagaacctgaaaccgtgtacgtacaagcagtgggagcacgcttaggcgtgtgactgcgtaccttttgtataatgggtcagcgacttatattctgtagcaaggttaaccgaataggggagccgaagggaaaccgagtcttaactgggcgttaagttgcagggtatagacccgaaacccggtgatctagccatgggcaggttgaaggttgggtaacactaactggaggaccgaaccgactaatgttgaaaaattagcggatgacttgtggctgggggtgaaaggccaatcaaaccgggagatagctggttctccccgaaagctatttaggtagcgcctcgtgaattcatctccgggggtagagcactgtttcggcaagggggtcatcccgacttaccaacccgatgcaaactgcgaataccggagaatgttatcacgggagacacacggcgggtgctaacgtccgtcgtgaagagggaaacaacccagaccgccagctaaggtcccaaagtcatggttaagtgggaaacgatgtgggaaggcccagacagccaggatgttggcttagaagcagccatcatttaaagaaagcgtaatagctcactggtcgagtcggcctgcgcggaagatgtaacggggctaaaccatgcaccgaagctgcggcagcgacgcttatgcgttgttgggtaggggagcgttctgtaagcctgcgaaggtgtgctgtgaggcatgctggaggtatcagaagtgcgaatgctgacataagtaacgataaagcgggtgaaaagcccgctcgccggaagaccaagggttcctgtccaacgttaatcggggcagggtgagtcgacccctaaggcgaggccgaaaggcgtagtcgatgggaaacaggttaatattcctgtacttggtgttactgcgaaggggggacggagaaggctatgttggccgggcgacggttgtcccggtttaagcgtgtaggctggttttccaggcaaatccggaaaatcaaggctgaggcgtgatgacgaggcactacggtgctgaagcaacaaatgccctgcttccaggaaaagcctctaagcatcaggtaacatcaaatcgtaccccaaaccgacacaggtggtcaggtagagaataccaaggcgcttgagagaactcgggtgaaggaactaggcaaaatggtgccgtaacttcgggagaaggcacgctgatatgtaggtgaggtccctcgcggatggagctgaaatcagtcgaagataccagctggctgcaactgtttattaaaaacacagcactgtgcaaacacgaaagtggacgtatacggtgtgacgcctgcccggtgccggaaggttaattgatggggttagcgcaagcgaagctcttgatcgaagccccggtaaacggcggccgtaactataacggtcctaaggtagcgaaattccttgtcgggtaagttccgacctgcacgaatggcgtaatgatggccaggctgtctccacccgagactcagtgaaattgaactcgctgtgaagatgcagtgtacccgcggcaagacggaaagaccccgtgaacctttactatagcttgacactgaacattgagccttgatgtgtaggataggtgggaggctttgaagtgtggacgccagtctgcatggagccgaccttgaaataccaccctttaatgtttgatgttctaacgttgacccgtaatccgggttgcggacagtgtctggtgggtagtttgactggggcggtctcctcctaaagagtaacggaggagcacgaaggttggctaatcctggtcggacatcaggaggttagtgcaatggcataagccagcttgactgcgagcgtgacggcgcgagcaggtgcgaaagcaggtcatagtgatccggtggttctgaatggaagggccatcgctcaacggataaaaggtactccggggataacaggctgataccgcccaagagttcatatcgacggcggtgtttggcacctcgatgtcggctcatcacatcctggggctgaagtaggtcccaagggtatggctgttcgccatttaaagtggtacgcgagctgggtttagaacgtcgtgagacagttcggtccctatctgccgtgggcgctggagaactgaggggggctgctcctagtacgagaggaccggagtggacgcatcactggtgttcgggttgtcatgccaatggcactgcccggtagctaaatgcggaagagataagtgctgaaagcatctaagcacgaaacttgccccgagatgagttctccctgaccctttaagggtcctgaaggaacgttgaagacgacgacgttgataggccgggtgtgtaagcgcagcgatgcgttgagctaaccggtactaatgaaccgtgaggcttaaccttacaacgccgaagctgttttggcggatgagagaagattttcagcctgatacagattaaatcagaacgcagaagcggtctgataaaacagaatttgcctggcggcagtagcgcggtggtcccacctgaccccatgccgaactcagaagtgaaacgccgtagcgccgatggtagtgtggggtctccccatgcgagagtagggaactgccaggcatcaaataaaacgaaaggctcagtcgaaagactgggcctttcgttttatctgttgtttgtcggtgaacgctctcctgagtaggacaaatccgccgggagcggatttgaacgttgcgaagcaacggcccggagggtggcgggcaggacgcccgccataaactgccaggcatcaaattaagcagaaggccatcctgacggatggcctttttgcgtttctacaaactcttcctgtcgtcatatctacaagccatccccccacagatacggtaaactagcctcgtttttgcatcaggaaagcagctatgaaccactccttaaaaccctggaacacatttggcattgatcataatgctcagcacattgtatgtgccgaagacgaacaacaattactcaatgcctggcagtatgcaaccgcagaaggacaacccgttcttattctgggtgaaggaagtaatgtactttttctggaggactatcgcggcacggtgatcatcaaccggatcaaaggtatcgaaattcatgatgaacctgatgcgtggtatttacatgtaggagccggagaaaactggcatcgtctggtaaaatacactttgcaggaaggtatgcctggtctggaaaatctggcattaattcctggttgtgtcggcagtagtcctatccagaatattggtgcttatggcgtagaattacagcgagtttgcgcttatgttgattctgttgaactggcgacaggcaagcaagtgcgcttaactgccaaagagtgccgttttggctatcgcgacagtatttttaaacatgaataccaggaccgcttcgctattgtagccgtaggtctgcgtctgccaaaagagtggcaacctgtactaacgtatggtgacttaactcgtctggatcctacaacagtaacgccacagcaagtatttaatgcggtgtgtcatatgcgcaccaccaaactccctgatccaaaagtgaatggcaatgccggtagtttcttcaaaaaccctgttgtatctgccgaaacggctaaagcattactgagtcaatttccaacagcaccaaattacccccaggcggatggtagtgtaaaactggcagcaggttggcttatcgatcagtgccagctaaaagggatgcaaataggtggggctgcggtgcaccgtcaacaggcgttagttctcattaatgaagacaatgcaaaaagcgaagatgttgtacagctggcgcatcatgtaagacagaaagttggtgaaaaatttaatgtctggcttgagcctgaagtccgctttattggtgcaagtggtgaagtgagcgcagtggagacaattagttgaaataaagcgcagtggagacaatttcatgaaggataacaccgtgccactgaaattgattgccctgttagcgaacggtgaatttcactctggcgagcagttgggtgaaacgctgggaatgagccgggcggctattaataaacacattcagacactgcgtgactggggcgttgatgtctttaccgttccgggtaaaggatacagcctgcctgagcctatccagttacttaatgctaaacagatattgggtcagctggatggcggtagtgtagccgtgctgccagtgattgactccacgaatcagtaccttcttgatcgtatcggagagcttaaaagcggcgatgcttgcattgcagaataccagcaggctggccgtggtcgccggggtcggaaatggtttagcccttttggcgcaaacttatatttgagcatgttctggcgtctggaacaaggcccggcggcggcgattggtttaagtctggttatcggtatcgtgatggcggaagtattacgcaagctgggtgcagataaagttcgtgttaaatggcctaatgacctctatctgcaggatcgcaagctggcaggcattctggtggagctgactggcaaaactggcgatgcggcgcaaatagtcattggagccgggatcaacatggcaatgcgccgtgttgaagagagtgtcgttaatcaggggtggatcacgctgcaggaagcggggatcaatctcgatcgtaatacgttggcggccatgctaatacgtgaattacgtgctgcgttggaactcttcgaacaagaaggattggcaccttatctgagccgctgggaaaagctggataattttattaatcgcccagtgaaacttatcattggtgataaagaaatatttggcattagtcgcggaatagacaaacagggggctttattacttgagcaggatggaataataaaaccctggatgggcggtgaaatatccctgcgtagtgcagaaaaataagaaaggggagtattcgctcccctgcaaattatttgcgtagtctgacctcttctaccgcatgattagcacttttcgtcaggattaaactggcgcgctcacgagtaggtagaatattttgctttaagttcagccagttgatctctttccacaatgtcatggcagtcttaatcgcttcttctttagttaatttcgcgtagttatgaaaataggaatccgggtcggtaaaagccccttcgcggaatttcagaaaacggttgatataccatgtctgaagtaagtcttccggtgcatcaacatatatgctaaaatcgacaaaatcagaaacaaatacatgatgtggatcgtgtggataatccatcccgctctgtaagacatttaacccttcaagaattaaaatatcaggctgaacaaccgttttatctccatccgggatcacatcataaataagatgactgtaaacaggtgctgtaacgtttggcacgccggatttgagatcggaaacaaacttcaccaggcgatgcatatcatagctttccgggaagcctttcttcttcatcagaccacgttctttcagaacctgattagggtgaaggaagccatctgtagtgatcagttcaacacgacgatgttccggccaacggcttaatagcgcctgcaatacacgggcggttgtacttttccccaccgcgacactgccagcaatactgataatgtaaggaatgcgttgcccgttggtaccaagaaactgttccagaactgcctgacggcgcagattgctgcttatatagaagttcagcaaacgactcaaaggtaaatagatctcggcaacttcttctaagctgagatcttcattaatacctttgagacgggcgatctcatcttcgcttaacgtcataggtacggaatcacgcagagctgcccactggttgcggtcaaactgtaggtaaggcgtcattaacgtttgctcttttatactcataagcatgtttctggcggtcatagctctatcggcaaagcgatatttgccatggcgcgtcacagttctgttgaatgggttaatgggcaggagggtaacaccagatggggaggaataataagaaaaaatctctgccaggaagctatcgttgaaaagcaatgtgacagatattccatctgataaaaagaattatggtttagcaggagcgcattgttgagcacaatgatgttgaaaaagtgtgctaatctgccctccgttcggctgtttcttcatcgtgtcgcataaaatgtgaccaataaaacaaattatgcaattttttagttgcatgaactcgcatgtctccatagaatgcgcgctacttgatgccgacttagctcagtaggtagagcaactgacttgtaatcagtaggtcaccagttcgattccggtagtcggcaccatcaagtccggtggggttcccgagcggccaaagggagcagactgtaaatctgccgtcacagacttcgaaggttcgaatccttcccccaccaccaatttcggccacgcgatggcgtagcccgagacgataagttcgcttaccggctcgaataaagagagcttctctcgatattcagtgcagaatgaaaatcaggtagccgagttccaggatgcgggcatcgtataatggctattacctcagccttccaagctgatgatgcgggttcgattcccgctgcccgctccaagatgtgctgatatagctcagttggtagagcgcacccttggtaagggtgaggtcggcagttcgaatctgcctatcagcaccacttcttttctcctccctgttttttccttctgtttattgcattcaacaagtcgggcatgttgcctggttgatgtggtgatatcaccgatttatccgtgtcttagagggacaatcgatgtctaaagaaaagtttgaacgtacaaaaccgcacgttaacgtcggtactatcggccacgttgaccatggtaaaacaacgctgaccgctgcaatcactaccgtactggctaaaacctacggcggtgctgctcgcgcattcgaccagatcgataacgcgccggaagaaaaagctcgtggtatcaccatcaacacttctcacgttgaatacgacaccccgacccgccactacgcacacgtagactgcccggggcacgccgactatgttaaaaacatgatcaccggtgctgcgcagatggacggcgcgatcctggtagttgctgcgactgacggcccgatgccgcagactcgtgagcacatcctgctgggtcgtcaggtaggcgttccgtacatcatcgtgttcctgaacaaatgcgacatggttgatgacgaagagctgctggaactggttgaaatggaagttcgtgaacttctgtctcagtacgacttcccgggcgacgacactccgatcgttcgtggttctgctctgaaagcgctggaaggcgacgcagagtgggaagcgaaaatcctggaactggctggcttcctggattcttacattccggaaccagagcgtgcgattgacaagccgttcctgctgccgatcgaagacgtattctccatctccggtcgtggtaccgttgttaccggtcgtgtagaacgcggtatcatcaaagttggtgaagaagttgaaatcgttggtatcaaagagactcagaagtctacctgtactggcgttgaaatgttccgcaaactgctggacgaaggccgtgctggtgagaacgtaggtgttctgctgcgtggtatcaaacgtgaagaaatcgaacgtggtcaggtactggctaagccgggcaccatcaagccgcacaccaagttcgaatctgaagtgtacattctgtccaaagatgaaggcggccgtcatactccgttcttcaaaggctaccgtccgcagttctacttccgtactactgacgtgactggtaccatcgaactgccggaaggcgtagagatggtaatgccgggcgacaacatcaaaatggttgttaccctgatccacccgatcgcgatggacgacggtctgcgtttcgcaatccgtgaaggcggccgtaccgttggcgcgggcgttgtagcaaaagttctgagctaattgccgataacatttgacgcaatgcgcactaaaagggcatcatttgatgccctttttgcacgctttcgtaccagaacctggctcatcagtgattttctttgtcataatcattgctgagacaggctctgttgagggcgtataatccgaaaagctaatacgcgtttcgatttggtttgcctcgcgatcgcggggtgaaaatgtttgtagaaaacttctgacaggttggtttatgagtgcgaataccgaagctcaaggaagcgggcgcggcctggaagcgatgaagtgggtcgttgtggtggcattgctcctggtggcgattgtcggcaactatctttatcgcgacattatgctgccgctgcgtgcgctggccgtagtaattctgattgctgcagcgggtggtgtcgcgctgttaacgacaaaaggtaaagctaccgttgcttttgcccgtgaagcgcgtaccgaagtccgtaaggtcatttggccgactcgccaggaaacattgcacaccacgctgattgtggctgcggttaccgcagtaatgagtctgatcctgtggggactggatggtattctggttcgcctggtatcctttatcactggcctgaggttctgagatgtctgaagctcctaaaaagcgctggtacgtcgttcaggcgttttccggttttgaaggccgcgtagcaacgagcctgcgtgagcatatcaaattacacaacatggaagatttgtttggtgaagtcatggtaccaaccgaagaagtggttgaaatccgtggcggtcagcgtcgcaaaagcgaacgtaaattcttccctggctacgtcctcgttcagatggtgatgaacgacgcgagctggcacctggtgcgcagcgtaccgcgtgtgatgggcttcatcggcggtacttccgatcgtcctgcgccaatcagcgataaagaagtcgatgcgattatgaaccgcctgcagcaggttggtgataagccgcgtccgaaaacgctgtttgaaccgggtgaaatggtccgtgttaatgatggtccgttcgctgacttcaacggtgttgttgaagaagtggattacgagaaatctcgtctgaaagtgtctgtttctatcttcggtcgtgcgaccccggtagagctggacttcagccaggttgaaaaagcctaacccagcgatcaaaaaagcggcgatttaatcgttgcacaaggcgtgagattggaatacaatttcgcgccttttgtttttatgggccttgcccgtaaaacgattttttatatcacggggagcctctcagaggcgttattacccaacttgaggaatttataatggctaagaaagtacaagcctatgtcaagctgcaggttgcagctggtatggctaacccgagtccgccagtaggtccggctctgggtcagcagggcgtaaacatcatggaattctgcaaagcgttcaacgcaaaaactgattccatcgaaaaaggtctgccgattccggtagtaatcaccgtttacgctgaccgttctttcactttcgttaccaagaccccgccggcagcagttctgctgaaaaaagcggctggtatcaagtctggttccggtaagccgaacaaagacaaagtgggtaaaatttcccgcgctcagctgcaggaaatcgcgcagaccaaagctgccgacatgactggtgccgacattgaagcgatgactcgctccatcgaaggtactgcacgttccatgggcctggtagtggaggactaagaaatggctaaactgaccaagcgcatgcgtgttatccgcgagaaagttgatgcaaccaaacagtacgacatcaacgaagctatcgcactgctgaaagagctggcgactgctaaattcgtagaaagcgtggacgtagctgttaacctcggcatcgacgctcgtaaatctgaccagaacgtacgtggtgcaactgtactgccgcacggtactggccgttccgttcgcgtagccgtatttacccaaggtgcaaacgctgaagctgctaaagctgcaggcgcagaactggtaggtatggaagatctggctgaccagatcaagaaaggcgaaatgaactttgacgttgttattgcttctccggatgcaatgcgcgttgttggccagctgggccaggttctgggtccgcgcggcctgatgccaaacccgaaagtgggtactgtaacaccgaacgttgctgaagcggttaaaaacgctaaagctggccaggttcgttaccgtaacgacaaaaacggcatcatccacaccaccatcggtaaagtggactttgacgctgacaaactgaaagaaaacctggaagctctgctggttgcgctgaaaaaagcaaaaccgactcaggcgaaaggcgtgtacatcaagaaagttagcatctccaccaccatgggtgcaggtgttgcagttgaccaggctggcctgagcgcttctgtaaactaatgcctttacgtgggcggtgattttgtctacaatcttacccccacgtataatgcttaatgcagacgtatatccgagatattcgggttgtggcaaggcggcaactgagtgagtcgccaggagcatagctaactatgtgactggtgcgaatgaaggaagccaacgccgtcacaagctgaatagcgacggatagaaaagatttgttcgttggagcctggcctatccaggcctccgtcgaagaccgcaggagtttcgcaagaaacttaatcccctgcgtagacggtgacagaacgctaagattattcttttatattctggcttgtttctgctcaccgtaattaagacgctctctccgtttggaggagtgaagtgagttccagagattttctctggcaaacatccaggagcaaagctaatggctttaaatcttcaagacaaacaagcgattgttgctgaagtcagcgaagtagccaaaggcgcgctgtctgcagtagttgcggattcccgtggcgtaactgtagataaaatgactgaactgcgtaaagcaggtcgcgaagctggcgtatacatgcgtgttgttcgtaacaccctgctgcgccgtgctgttgaaggtactccgttcgagtgcctgaaagacgcgtttgttggtccgaccctgattgcatactctatggaacacccgggcgctgctgctcgtctgttcaaagagttcgcgaaagcgaatgcaaaatttgaggtcaaagccgctgcctttgaaggtgagctgatcccggcgtctcagatcgaccgcctggcaactctgccgacctacgaagaagcaattgcacgcctgatggcaaccatgaaagaagctagcgctggcaaactggttcgtactctggctgctgtacgcgatgcgaaagaagctgcttaatcgcagttatctttttaacgcattcgcttacgtataaacttattctgatattcaggaacaatttaaatgtctatcactaaagatcaaatcattgaagcagttgcagctatgtctgtaatggacgttgtagaactgatctctgcaatggaagaaaaattcggtgtttccgctgctgctgctgtagctgtagctgctggcccggttgaagctgctgaagaaaaaactgaattcgacgtaattctgaaagctgctggcgctaacaaagttgctgttatcaaagcagtacgtggcgcaactggcctgggtctgaaagaagctaaagacctggtagaatctgcaccggctgctctgaaagaaggcgtgagcaaagacgacgcagaagcactgaaaaaagctctggaagaagctggcgctgaagttgaagttaaataagccaacccttccggttgcagcctgagaaatcaggctgatggctggtgactttttagtcaccagcctttttgcgctgtaaggcgccagtagcgtttcacactgtttgactactgctgtgcctttcaatgcttgtttctatcgacgacttaatatactgcgacaggacgtccgttctgtgtaaatcgcaatgaaatggtttaagcgtgatagcaacaggcattgcggaaagtgttccattttccggtcaacaaaatagtgttgcacaaactgtccgctcaatggacagatgggtcgacttgtcagcgagctgaggaaccctatggtttactcctataccgagaaaaaacgtattcgtaaggattttggtaaacgtccacaagttctggatgtaccttatctcctttctatccagcttgacagctttcagaaatttatcgagcaagatcctgaagggcagtatggtctggaagctgctttccgttccgtattcccgattcagagctacagcggtaattccgagctgcaatacgtcagctaccgccttggcgaaccggtgtttgacgtccaggaatgtcaaatccgtggcgtgacctattccgcaccgctgcgcgttaaactgcgtctggtgatctatgagcgcgaagcgccggaaggcaccgtaaaagacattaaagaacaagaagtctacatgggcgaaattccgctcatgacagacaacggtacctttgttatcaacggtactgagcgtgttatcgtttcccagctgcaccgtagtccgggcgtcttctttgactccgacaaaggtaaaacccactctagcggtaaagtgctgtataacgcgcgtatcatcccttaccgtggttcctggctggacttcgaattcgatccgaaggacaacctgttcgtacgtatcgaccgtcgccgtaaactgcctgcgaccatcattctgcgcgccctgaactacaccacagagcagatcctcgacctgttctttgaaaaagttatctttgaaatccgtgataacaagctgcagatggaactggtgccggaacgcctgcgtggtgaaaccgcatcttttgacatcgaagctaacggtaaagtgtacgtagaaaaaggccgccgtatcactgcgcgccacattcgccagctggaaaaagacgacgtcaaactgatcgaagtcccggttgagtacatcgcaggtaaagtggttgctaaagactatattgatgagtctaccggcgagctgatctgcgcagcgaacatggagctgagcctggatctgctggctaagctgagccagtctggtcacaagcgtatcgaaacgctgttcaccaacgatctggatcacggcccatatatctctgaaaccttacgtgtcgacccaactaacgaccgtctgagcgcactggtagaaatctaccgcatgatgcgccctggcgagccgccgactcgtgaagcagctgaaagcctgttcgagaacctgttcttctccgaagaccgttatgacttgtctgcggttggtcgtatgaagttcaaccgttctctgctgcgcgaagaaatcgaaggttccggtatcctgagcaaagacgacatcattgatgttatgaaaaagctcatcgatatccgtaacggtaaaggcgaagtcgatgatatcgaccacctcggcaaccgtcgtatccgttccgttggcgaaatggcggaaaaccagttccgcgttggcctggtacgtgtagagcgtgcggtgaaagagcgtctgtctctgggcgatctggataccctgatgccacaggatatgatcaacgccaagccgatttccgcagcagtgaaagagttcttcggttccagccagctgtctcagtttatggaccagaacaacccgctgtctgagattacgcacaaacgtcgtatctccgcactcggcccaggcggtctgacccgtgaacgtgcaggcttcgaagttcgagacgtacacccgactcactacggtcgcgtatgtccaatcgaaacccctgaaggtccgaacatcggtctgatcaactctctgtccgtgtacgcacagactaacgaatacggcttccttgagactccgtatcgtaaagtgaccgacggtgttgtaactgacgaaattcactacctgtctgctatcgaagaaggcaactacgttatcgcccaggcgaactccaacttggatgaagaaggccacttcgtagaagacctggtaacttgccgtagcaaaggcgaatccagcttgttcagccgcgaccaggttgactacatggacgtatccacccagcaggtggtatccgtcggtgcgtccctgatcccgttcctggaacacgatgacgccaaccgtgcattgatgggtgcgaacatgcaacgtcaggccgttccgactctgcgcgctgataagccgctggttggtactggtatggaacgtgctgttgccgttgactccggtgtaactgcggtagctaaacgtggtggtgtcgttcagtacgtggatgcttcccgtatcgttatcaaagttaacgaagacgagatgtatccgggtgaagcaggtatcgacatctacaacctgaccaaatacacccgttctaaccagaacacctgtatcaaccagatgccgtgtgtgtctctgggtgaaccggttgaacgtggcgacgtgctggcagacggtccgtccaccgacctcggtgaactggcgcttggtcagaacatgcgcgtagcgttcatgccgtggaatggttacaacttcgaagactccatcctcgtatccgagcgtgttgttcaggaagaccgtttcaccaccatccacattcaggaactggcgtgtgtgtcccgtgacaccaagctgggtccggaagagatcaccgctgacatcccgaacgtgggtgaagctgcgctctccaaactggatgaatccggtatcgtttacattggtgcggaagtgaccggtggcgacattctggttggtaaggtaacgccgaaaggtgaaactcagctgaccccagaagaaaaactgctgcgtgcgatcttcggtgagaaagcctctgacgttaaagactcttctctgcgcgtaccaaacggtgtatccggtacggttatcgacgttcaggtctttactcgcgatggcgtagaaaaagacaaacgtgcgctggaaatcgaagaaatgcagctcaaacaggcgaagaaagacctgtctgaagaactgcagatcctcgaagcgggtctgttcagccgtatccgtgctgtgctggtagccggtggcgttgaagctgagaagctcgacaaactgccgcgcgatcgctggctggagctgggcctgacagacgaagagaaacaaaatcagctggaacagctggctgagcagtatgacgaactgaaacacgagttcgagaagaaactcgaagcgaaacgccgcaaaatcacccagggcgacgatctggcaccgggcgtgctgaagattgttaaggtatatctggcggttaaacgccgtatccagcctggtgacaagatggcaggtcgtcacggtaacaagggtgtaatttctaagatcaacccgatcgaagatatgccttacgatgaaaacggtacgccggtagacatcgtactgaacccgctgggcgtaccgtctcgtatgaacatcggtcagatcctcgaaacccacctgggtatggctgcgaaaggtatcggcgacaagatcaacgccatgctgaaacagcagcaagaagtcgcgaaactgcgcgaattcatccagcgtgcgtacgatctgggcgctgacgttcgtcagaaagttgacctgagtaccttcagcgatgaagaagttatgcgtctggctgaaaacctgcgcaaaggtatgccaatcgcaacgccggtgttcgacggtgcgaaagaagcagaaattaaagagctgctgaaacttggcgacctgccgacttccggtcagatccgcctgtacgatggtcgcactggtgaacagttcgagcgtccggtaaccgttggttacatgtacatgctgaaactgaaccacctggtcgacgacaagatgcacgcgcgttccaccggttcttacagcctggttactcagcagccgctgggtggtaaggcacagttcggtggtcagcgtttcggggagatggaagtgtgggcgctggaagcatacggcgcagcatacaccctgcaggaaatgctcaccgttaagtctgatgacgtgaacggtcgtaccaagatgtataaaaacatcgtggacggcaaccatcagatggagccgggcatgccagaatccttcaacgtattgttgaaagagattcgtagcctgggtatcaacatcgaactggaagacgagtaattctcgctcaaacaggtcactgctgtcgggttaaaacccggcagcggattgtgctaactccgacgggagcaaatccgtgaaagatttattaaagtttctgaaagcgcagactaaaaccgaagagtttgatgcgatcaaaattgctctggctagcccagacatgatccgtagttggtctttcggtgaagttaaaaagccggaaaccatcaactaccgtacgttcaaaccagaacgtgacggccttttctgcgcccgtatctttgggccggtaaaagattacgagtgcctgtgcggtaagtacaagcgcctgaaacaccgtggcgtcatctgtgagaagtgcggcgttgaagtgacccagactaaagtacgccgtgagcgtatgggccacatcgaactggcttccccgactgcgcacatctggttcctgaaaagcctgccgtcccgtatcggtctgctgctcgatatgccgctgcgcgatatcgaacgcgtactgtactttgaatcctatgtggttatcgaaggcggtatgaccaacctggaacgtcagcagatcctgactgaagagcagtatctggacgcgctggaagagttcggtgacgaattcgacgcgaagatgggggcggaagcaatccaggctctgctgaagagcatggatctggagcaagagtgcgaacagctgcgtgaagagctgaacgaaaccaactccgaaaccaagcgtaaaaagctgaccaagcgtatcaaactgctggaagcgttcgttcagtctggtaacaaaccagagtggatgatcctgaccgttctgccggtactgccgccagatctgcgtccgctggttccgctggatggtggtcgtttcgcgacttctgacctgaacgatctgtatcgtcgcgtcattaaccgtaacaaccgtctgaaacgtctgctggatctggctgcgccggacatcatcgtacgtaacgaaaaacgtatgctgcaggaagcggtagacgccctgctggataacggtcgtcgcggtcgtgcgatcaccggttctaacaagcgtcctctgaaatctttggccgacatgatcaaaggtaaacagggtcgtttccgtcagaacctgctcggtaagcgtgttgactactccggtcgttctgtaatcaccgtaggtccatacctgcgtctgcatcagtgcggtctgccgaagaaaatggcactggagctgttcaaaccgttcatctacggcaagctggaactgcgtggtcttgctaccaccattaaagctgcgaagaaaatggttgagcgcgaagaagctgtcgtttgggatatcctggacgaagttatccgcgaacacccggtactgctgaaccgtgcaccgactctgcaccgtctgggtatccaggcatttgaaccggtactgatcgaaggtaaagctatccagctgcacccgctggtttgtgcggcatataacgccgacttcgatggtgaccagatggctgttcacgtaccgctgacgctggaagcccagctggaagcgcgtgcgctgatgatgtctaccaacaacatcctgtccccggcgaacggcgaaccaatcatcgttccgtctcaggacgttgtactgggtctgtactacatgacccgtgactgtgttaacgccaaaggcgaaggcatggtgctgactggcccgaaagaagcagaacgtctgtatcgctctggtctggcttctctgcatgcgcgcgttaaagtgcgtatcaccgagtatgaaaaagatgctaacggtgaattagtagcgaaaaccagcctgaaagacacgactgttggccgtgccattctgtggatgattgtaccgaaaggtctgccttactccatcgtcaaccaggcgctgggtaaaaaagcaatctccaaaatgctgaacacctgctaccgcattctcggtctgaaaccgaccgttatttttgcggaccagatcatgtacaccggcttcgcctatgcagcgcgttctggtgcatctgttggtatcgatgacatggtcatcccggagaagaaacacgaaatcatctccgaggcagaagcagaagttgctgaaattcaggagcagttccagtctggtctggtaactgcgggcgaacgctacaacaaagttatcgatatctgggctgcggcgaacgatcgtgtatccaaagcgatgatggataacctgcaaactgaaaccgtgattaaccgtgacggtcaggaagagaagcaggtttccttcaacagcatctacatgatggccgactccggtgcgcgtggttctgcggcacagattcgtcagcttgctggtatgcgtggtctgatggcgaagccggatggctccatcatcgaaacgccaatcaccgcgaacttccgtgaaggtctgaacgtactccagtacttcatctccacccacggtgctcgtaaaggtctggcggataccgcactgaaaactgcgaactccggttacctgactcgtcgtctggttgacgtggcgcaggacctggtggttaccgaagacgattgtggtacccatgaaggtatcatgatgactccggttatcgagggtggtgacgttaaagagccgctgcgcgatcgcgtactgggtcgtgtaactgctgaagacgttctgaagccgggtactgctgatatcctcgttccgcgcaacacgctgctgcacgaacagtggtgtgacctgctggaagagaactctgtcgacgcggttaaagtacgttctgttgtatcttgtgacaccgactttggtgtatgtgcgcactgctacggtcgtgacctggcgcgtggccacatcatcaacaagggtgaagcaatcggtgttatcgcggcacagtccatcggtgaaccgggtacacagctgaccatgcgtacgttccacatcggtggtgcggcatctcgtgcggctgctgaatccagcatccaagtgaaaaacaaaggtagcatcaagctcagcaacgtgaagagcgttgtgaactccagcggtaaactggttatcacttcccgtaatactgaactgaaactgatcgacgaattcggtcgtactaaagaaagctacaaagtaccttacggtgcggtactggcgaaaggcgatggcgaacaggttgctggcggcgaaaccgttgcaaactgggacccgcacaccatgccggttatcaccgaagtaagcggttttgtacgctttactgacatgatcgacggccagaccattacgcgtcagaccgacgaactgaccggtctgtctagcctggtggttctggattccgcagaacgtaccgcaggtggtaaagatctgcgtccggcactgaaaatcgttgatgctcagggtaacgacgttctgatcccaggtaccgatatgccagcgcagtacttcctgccgggtaaagcgattgttcagctggaagatggcgtacagatcagctctggtgacaccctggcgcgtattccgcaggaatccggcggtaccaaggacatcaccggtggtctgccgcgcgttgcggacctgttcgaagcacgtcgtccgaaagagccggcaatcctggctgaaatcagcggtatcgtttccttcggtaaagaaaccaaaggtaaacgtcgtctggttatcaccccggtagacggtagcgatccgtacgaagagatgattccgaaatggcgtcagctcaacgtgttcgaaggtgaacgtgtagaacgtggtgacgtaatttccgacggtccggaagcgccgcacgacattctgcgtctgcgtggtgttcatgctgttactcgttacatcgttaacgaagtacaggacgtataccgtctgcagggcgttaagattaacgataaacacatcgaagttatcgttcgtcagatgctgcgtaaagctaccatcgttaacgcgggtagctccgacttcctggaaggcgaacaggttgaatactctcgcgtcaagatcgcaaaccgcgaactggaagcgaacggcaaagtgggtgcaacttactcccgcgatctgctgggtatcaccaaagcgtctctggcaaccgagtccttcatctccgcggcaagcttccaggagaccactcgcgtgctgaccgaagcagccgttgcgggcaaacgcgacgaactgcgcggcctgaaagagaacgttatcgtgggtcgtctgatcccggcaggtaccggttacgcgtaccaccaggatcgtatgcgtcgccgtgctgcgggtgaagctccggctgcaccgcaggtgactgcagaagacgcatctgccagcctggcagaactgctgaacgcaggtctgggcggttctgataacgagtaatcgttaatccgcaaataacgtaaaaacccgcttcggcgggtttttttatggggggagtttagggaaagagcatttgtcagaatatttaaggaatttctgaatactcataatcaatgtagagatgactaatatcctgaaactgactgaactaattgagtcaaactcggcaaggattcgatactattcctgtgtaactttcttaaggaacgagaatgaaacaggaagtggaaaagtggcgaccttttggacatccggatggtgatattcgtgatttaagttttcttgatgctcatcaggctgtctacgttcagcatcatgagggcaaagagcctttagagtatcgcttttgggttacctactctcttcactgcttcacaaaagattatgaacatcagacgaacgaagaaaaacaaagcttaatgtaccacgcgcctaaagaatctcgtcccttctgccagcaccgttataacttagcgcgcacacacttaaaaagaactattttggcgctgccagaaagcaacgttattcatgccgggtatggtagctatgccgtgattgaggtggacttagacggaggagataaggcattttactttgttgcgttcagggctttcagggaaaagaaaaaactccgtttgcatgtaactagcgcttatcccatttctgaaaaacagaaaggtaaaagtgtgaaatttttcaccattgcctacaacttattgagaaataagcagcttcctcagcccagtaaataacaaaacccaccttaaggtgggtttcgccagagaattatctctggtattcagaacgccattaccggactttgccttgaccttgcgataatcgcaggttgcgggatgtctgaatttcttcagtctgctgcatcctggaagatgagaacatgtgttcttattttcgtctctatcatagttgagtatttactctcttacaatcagatctctttcattgctcaacaggcgatggcttcagactttgcattacggaatttttaagaaaggcagggcgaaacgaggaagaagcttttcgccctggacaacattcctgctgacggcactaccataaaaaaacacaacgctttcaacaaccttgcgtttttcatcttccgtagcggctcggaataaatttacgttcttacattccgtctcatagtctttggctggcgcgtcccagatagctgtcccagtctttccataccggctgcaaaccctgagcggttaacgcggcagcaaccgcttccggtctgcgatcgtcgtgcggactgaactgttccaactcggggtgattatcggcatagccacctggctgcgttttgctgaaggcgctgacgttattgatcgccagcggaataacgcgatcgcgaaaccacggactttcccgcgtggagagactcagttcaatctccggtgcaagcagtcggaaggcgcagatggtttgcactaactggcgttcatccataatgctcgcaggctcaatgccgccagtacacgggcgcaggcgcggaaaggagacagagtaacggctttgccagtaatgctgttgcagccatagcaaatgttcggcaaccatatagctgtcaacgcgccagttgtcggaaaggccaattagcgcgccgaggcctatcttatcaatccccgcacgccccagccgatccggcgtttccagccgccagaagaagtcctgttttttgcctttcagatgatggcgggcataagtcgcctcgtgatatgtctcctgataaaccatcacgccatccagaccaagttgctttaactcggcgtattccgtctccgccagcggttgcacttccatctgtagactagagaactgttcacgaagggcagggagatgacgacgaaagtaatccatccccactttcgcctgatgttcaccagtgactaacagcagatgttcaaagcccatctcccgtatagcggcactttccctggcaatatccgcttcatccagcgttttgcgcttgatgcgattactcatggaaaatccacagtacgtgcagtcgttagcgcaaagattggaaagataaagcgggacgtagaaactaactgtgttgccaaatcgctgacgggtcagacgctgcgcccgttgggccagttgttccagatagccactggcggcagggcttaacagcgccatcatgtcgtcgcgggtgagttggctggcatttagcgcccgctctacgtcagcagccgttttgccgttgatacgcaggcggatgtcgtcccagtccagttgtcgccagcgatcgctgaaggttttcatgcgcttgcctccagaaatccggtcagcgggctggtggcatgagcaaaataactgcggctgcccggtccggactgacgtgccagtaggcctgcttctaccgccagacgaaatgccttcgccatgttgacgggatcgtccgcgacggcaatcgccgtattcactaacaccgcgtcggcccccatttccagcgcctgcgcggcatggctgggaacgccgatgccagcatcgacaaccaccggcactgtggcctgctggataataatctccagcatggcgcgggtttccagtccctgattgctgccaatcggcgcgccgagcggcatcaccgctgcacagccgacttcttccagacgtttacacaataccggatcggccccgcagtaaggcagcacgacaaatccctgttgtaccagcgtttcggcggctttcagggtttcgatgggatcgggcaacagccagcgggcgtcagggtgaatctctaattttaaccagtttgtgcctaacgcttcacgagccagatgggcggcgaaaatggcttcttccgctgttttcgccccggatgtatttggcagcagggtcacacccgccgcgataagcggttcgaggatagcgtcgttgtgctggcgcaagtcgacacgtttcatcgccagtgtcaccagctggctgccggaagcgcggatcgcctccaccatcagttgactagaagcgaatttccctgtgccggtaaacagatgactatcaaacgttttgtccgcaatacgtaacatttcaaccccctgcaataacctgaaaaagcaggatctggtcgccatcctgcacgatatgttgcgcccactgctcacgcgggacgatttgctgattaatcgccagagccgcgcccgcttgtcgttggtcgagttgctccagtagttcgtgaacagtttgcccggcggcgcactgcatcgcttgatcgttaaacaggatctgcattgcttcctccgcataccgggcaaccactggcgcggcgcaacgccaggctgcgccactggctgcttttaccgtcgaacagtcggagttctcccgcaggtgtctctataccgcttaataacttaatggcttccagtgcctgcaaagtgcccataaccccgaccaccgggccaaccacgcccgccgtgcggcagttgcgttctggctcctggttatctggccacaggcagcggtaacacccctgctcccagggcggcgtcagtaccatcaactgaccgccaaatccgaccgcgctggcggtgataagcggcgtgttgagtgccacgcaggcggcattaatctcctggcgagtcgccatattgtcggtacagtcgagcaccacatcggcccgtgcaaccgcatcttttaacgcctcacccgttaaccgttgttgtaatgctgtcagttgaatgtcgggattcaactgtgtcagtcgctgttggctgacctggcttttcgggcgatcgatatcttcagtggtaaagaggatttgtcgttgcagattgcttaaatgcacatcgtcgtcatctgccagtaccagcgtcccgacgccagcgcccgccaggtacagcgcagcaggtgtacccagcccgcccagaccgataatcagcacctggctgtcgagcagtttttgctgcccgtccagagcgatatcgtcgagcaggatttggcggctataacgcataaagtcacggtcattcatcgccaactcctgcaatttccagcaactgtgccgttgccaaacgccagtctgcggcttgagtaatggcgctgacgacggcgatactgccgacacccgttgctatcaccgcaggcgcgcgtgccagactgataccgccaatcgccacggtgggataatccgccagtcgctcaacatgccgtgccagctgttccagcccctgcggtgcagaaggcatctgtttggtttgcgtcgggaacacatgtcccagcgcgatataagaggggcgtgctgccagcgcgacgtcgatttccatatcgtcatgtgtgctaacgcccagccgcaggcctgccgcgcggatggcattgagatcggtggcttgcaaatcttcctgccccaaatggacgccatacgcctgatgcttgatcgccagccgccagtaatcgttgataaacaatcgcgcgttatagcggcggcccagcgcaattgccgccacgacatcggcttccacctcttcatcgcgccgatctttgatgcgtagctggagagtacgtacgcctgcatccaacagacgttcgatccactgtacgctgtccaccaccgggtacagtccactacgaaaaggtacaggaggaaaatcaggctgatacatcacgcttcctccttacgcaggtagatttctccgcctctggcacggaagttctcgctcatatccgccattcccatttcaatagtttgcgtggcggcgtaatcacgcacttcctggctgattttcatgctgcagaatttcggcccacacatggagcaaaaatgggcgactttaccactctcttgcggcagggtttcatcgtgataagcgcgggcggtaaacgggtcgagggccagattaaactggtcttcccagcgaaattcgaagcgggctttgctcatggcgttatcgcgaatttgcgcgcccggatgccctttcgccaggtcagcggcgtgggcagcaatcttataggtgataagcccctgcttaacatcttctttattgggcagacccagatgctcttttggcgttacgtaacagagcatcgcgcagccaaaccagccaatcatcgccgcaccaatcccgctcgtgaagtggtcatagcccggcgcaatatcggtagttagcggccccagagtgtaaaacggcgcttcgtggcagtgctctaactcctcggtcatattgcggcggatcatctgcatcggcacgtggcctgggccttcaatcatcacctgcacgtcatattcccaggcaattttggtcagttcgcccagcgtatgcagctcggcaaactgcgcttcatcgttggcgtcctgaatagaaccggggcgcagaccgtcgcccaggctcaggctaacgtcataagcggcacagatttcacaaatttcgcggaagtgttgatagaggaaattttcctgatgatgggagaggcaccatttcgccataatgctaccgccgcgagagacgataccggtcaggcgtttcgcggtcatcggcacatagcgcagcagtacgcccgcatggatagtgaagtaatccacaccttgctcggcctgttccagcagcgtgtcgcggaacgcttcccaggtaagatcttcggcgatcccgttaaccttctccagcgcctggtagatcggcactgtaccgatcggcaccgggctgttacgcaaaatccactcgcgggtttcgtgaatatagcgaccggtggagagatccatcaccgtatccgctccccagcgcgtggaccataccagcttttccacttcttcttcgatggaagaggtgaccgcgctgttgccgatattggcgttaacttttaccaggaaattgcgaccaataatcatcggctcgctttccggatgattaatgttggccgggataatcgcacgtccggcagcaacttcatcacggacaaattccgcagtgatattttccggcagatgtgcgccaaagctcattcccggatgctggtggcgtaaaacctcgctacggatgcgctcgcggcccatattctcgcggatggcgatgaattccatttccggcgtgatgatgccctggcgggcgtagtgcagttgggtgacacggcgtcctgctttggcgcgttttggtgttagtacgccgctaaaacgcagttcgtcgaggccatcatctgccagccgcgctttagtgtaatcggaactgcgcacggtaagttcttcggtatcgccgcgcgcatcgatccacggctggcgtagttttgccagcccttgctgcacgttaatggcaatctgcggatcaccatacgggccggaggtgtcgtagaccggaatcgcttcgttttcttcgtactgcggctgttctttgctaccgccaattagcgtcgggctaagctggatctcacgcatcggcacgcgcacgccggggtgtgtgccagtgatataaatgcgtttactgttgggaaaggcggtgccttccagggtgtcgataaaatgttgggcccgggcgcgttgttcgcggcgggtcagttttgttgcagacatagctcattccaaaaagttaaggacgtggcttgtcagacgacggatgaagcaagagacgatcgccgcaggggcgatgcgatagcagattaactcttgttcccttcgcaggtattagcctgatcaggttccgcggatcccgaataaacggtctcagccagttaaggcactccgacaagaaattagccccgcaaatggggcattgaatgtaaattacgcgttaacagcgcagaactcaagcaggatgtttgacgcgggcggcgtcaagcaccagcagaatcagcttatcttccagcacaaagcgcgcttccagcgcctcgccgatgtcagataaaacctgttgaaactcaaggtaattatcatgatcgatggcggtttccagactggaatcgtagtaatccataatctgttgagtattggcttcgagttgcggccaaatcttcgcggcgcgcgcgagttgcccgttgccttccagcttatgaagaatgcgctcataaatactgaaatgtccggcagacaagtaatcgaccaggctctgacaaaaatcatcaagggctttttcgtttagcctcatgtagctttctttgccaggcttaatgccaaccagattgtagtaagccacgagcagatgcttacgtacatgtagccagcgatcaaccagtttgttacttcctctgacgcgctccgtcaggttatcgagctggttaagcatgattgactccgcaagtttgtattcaaaaactgctcagtgagaaatgtaaaaaccatgttaaacatgccagtgatgcaaaggtagtgcaagagctatggatcgtataattgaaaaattagatcacggctggtgggtcgtcagccatgaacaaaaattatggttgccgaagggagaattgccatatggcgaagcggcaaatttcgatcttgtgggtcagcgcgcactacaaatcggcgaatggcagggggaacctgtttggttagtacaacagcagcggcgtcacgatatggggagcgtacgtcaggtcattgatctcgatgttgggctgtttcaactggccggacgaggcgtacaactggcggagttttaccgaagtcataaatactgtggttactgcgggcatgaaatgtatccgagcaaaaccgaatgggcgatgctgtgcagccattgccgtgagcgttactacccgcaaatcgccccctgcattattgttgccatccgtcgcgatgatagcatcctcctcgcccagcatacccgccatcgtaacggtgtccatacagtacttgccggattcgtcgaagtgggcgaaaccctcgagcaggcagtcgcgcgggaagtgatggaagagagcggaattaaagttaaaaacttgcgttacgtgacttctcagccgtggccgtttcctcagtctttaatgaccgcgtttatggcggaatatgacagcggcgacatcgtgatcgacccgaaagaattgctcgaggcgaactggtatcgctatgacgatttgccgttactcccgccgcccggcaccgtagcgcgccgtctgatagaagatacggtggcgatgtgtcgggcagagtatgagtgatgatacactgaccgcctgacgcactaaggaacagccaaaatgaccgaacttaaaaacgatcgttatctgcgggcgctgctgcgccagcccgttgatgtcactccagtatggatgatgcgccaggcgggtcgctatctaccggaatataaagccacgcgcgcccaggcaggcgattttatgagcctgtgcaaaaacgccgagctggcgtgcgaagtgactttgcaaccgctgcgtcgctacccgctggatgcggcgatcctcttttccgatatcctcaccgtgccggacgcgatggggttagggctctattttgaagccggagaaggtccgcgttttaccagcccagtcacctgcaaagctgacgtcgataaactgccaattccggacccggaagatgaactgggttacgtgatgaacgcggtgcgtaccattcgtcgcgaactgaaaggcgaagtgccgctgattggtttttccggcagcccgtggacgctggcgacctacatggtggaaggcggcagcagcaaagccttcaccgtgatcaaaaaaatgatgtatgccgatccgcaggcgctgcacgctctgctcgataaactggcgaaaagcgtcactttgtatctgaatgcgcagattaaagccggtgctcaggcagtgatgattttcgacacctggggcggcgtgcttaccgggcgcgattatcaacagttcagcctctattacatgcataaaattgttgatggtttactgcgtgaaaacgacggtcgccgcgtaccggtcacgctgtttaccaaaggcggcggacagtggctggaagccatggcagaaaccggttgcgatgcgctgggcctcgactggacaacggacatcgccgatgcgcgccgccgtgtgggcaataaagtcgcgttgcagggtaatatggatccgagcatgctgtacgcgccgcctgcccgcattgaagaagaagtagcgactatacttgcaggtttcggtcacggcgaaggtcatgtctttaaccttggtcacggcattcatcaggatgtgccgccagaacatgctggcgtgttcgtggaggcagtgcatcgactgtctgaacagtatcaccgctaaggagtgattatggatctcgcgagtttacgcgctcaacaaatcgaactggcttcttctgtgatccgcgaggatcgactcgataaagatccaccggatctgatcgccggagccgatgtcgggtttgagcagggcggagaagtgacgcgagcggcgatggtgctgctgaaatatcccagccttgagctggtcgagtataaagttgcccgcatcgccaccaccatgccttacattccaggttttctttccttccgcgaatatcctgcgctgctggcagcgtgggagatgctgagccaaaagccggatttagtgtttgtcgatggtcatgggatcagccatcctcgccgtcttggcgtcgccagccattttggcttattggtggatgtgccgaccattggcgtggcgaaaaaacggctctgcggtaaattcgaaccgctctccagcgaaccgggcgcgctggccccactgatggataaaggcgagcagctggcctgggtctggcgcagcaaagcgcgctgtaacccgttgtttatcgctaccggccatcgggtcagcgtggacagcgcgctggcgtgggtacaacgctgcatgaaaggctatcgtctgccggagccaacgcgctgggcggacgcggtggccagcgaacgtccggcgttcgtgcgctatacagcaaatcagccctaattcaggtaaactgcggataatttccgtatttgagaactcaacatgttacaaaacccaattcatctgcgtctggagcgcctggaaagctggcagcatgtcactttcatggcttgcttatgcgaacgcatgtaccccaattacgccatgttctgccagcaaaccggttttggtgatgggcaaatttaccgtcgcattctcgatctcatctgggaaacgctgaccgttaaagacgcaaaagtaaatttcgacagccaactggagaaatttgaagaagcgattcctagtgccgacgatttcgatctgtacggcgtttatccggcaatcgatgcctgcgtggcgttaagtgaactggtccatagccgtttgagtggtgaaacgctcgaacacgcggtggaagtgagtaagacctccatcacgaccgttgcgatgctggaaatgactcaggctggtcgcgaaatgagcgatgaagagcttaaagaaaacccagctgtagagcaagaatgggacattcagtgggaaatattccgacttttagctgagtgcgaagaacgcgatatcgagctgataaaaggccttagggcagacctgcgtgaggcgggtgagagcaatattggtataatttttcagcaataagaccagaaaacgtgatttaacgcctgatttgtcgtacctggagtcttccctttcgcccccgtctggtctacatttggggggcgaaaaaaagtggctatcggtgcgtgtatgcaggagagtgctattctggcatttccgtcgcactcgatgcttagcaagcgataaacacattgtaaggataacttatgaacaagactcaactgattgatgtaattgcagagaaagcagaactgtccaaaacccaggctaaagctgctctggagtccactctggctgcaattactgagtctctgaaagaaggcgatgctgtacaactggttggtttcggtaccttcaaagtgaaccaccgcgctgagcgtactggccgcaacccgcagaccggtaaagaaatcaaaattgccgcagctaacgtaccggcatttgtttctggcaaggcactgaaagacgcagttaagtaagattgcgtggcagtgaacagttttaacgaaggggtggttagtccccttttgtctttctggcgtcgaagtttgatgctggctggcgctctgcttctcactgcctgtagtcataactctagtcttcctccctttaccgccagtggatttgctgaagaccagggcgcggtacgcatctggcgaaaagacagcggcgataatgtgcatctgcttgccgtgtttagcccgtggcgcagtggcgataccacgacgcgagagtatcgctggcagggcgataacctcacgctcatcaatatcaatgtttacagcaaaccgccggtgaatattcgcgcgcgttttgacgatcgcggtgatctgagctttatgcaacgtgaatccgatggggaaaagcagcagctttctaacgaccaaatcgatttataccgttatcgtgctgatcagatccgccagattagcgatgccttacgtcaggggagagtcgtgctgcgccaggggcgctggcatgcgatggaacagaccgtgaccacctgcgaagggcaaaccattaaacctgatttagatagccaggcgatagcgcatatcgagcgccgccagagccgctcttctgttgatgtcagcgtggcatggctggaagcgcccgaaggtagccaattactgttagtggcaaactctgatttctgtcgctggcaacccaacgagaaaacgttctgatttaccagtggcccatacccatatgaccgccaccaccgcagccgccgtagcccatgcccattccggctccgcgcggaatacccgcttcagccatcgcgatatctcgtttcacccgtaactcatctaagctctgacgcaaattctccatctctttggcgaccgcgttaattttgctgctatccggtgggttcgcggctaacagggcattgtattcataacgcttcgtcaccagttgctgttgcagtgcgctgctttgagcgtaaaagtcattatggattttctgccacgctgtctgttgttcgctggtcaaaggcgcggcattttgctgccacataccgtgtccgccgtgagcaaatgcagatgtgcttcccatcgccattgcactaagcgccatcattaccagggcaattttcgtgttccgtttcatggttaatcctccagtggttgtcttacttcgggtattgcatcttccgtgccaacgatgaaacgctgatatgacgggtaatctggcatgataaacgagtaaaaatgactcgcctgctgcgggtagcgagtcatttttactcattgaaacttaagcctttgtgttacagcgcagggtaagcgctgataaaagatggcatgatttctgctgtcagaaagggatgagcaggcaaagaagaagatgcgttttatgcaacgttctaaagactccttagctaaatggttaagcgcgatcctccccgtggtcattgttgggctggtgggattgtttgcggtaactgtgattcgtgattatgggcgggcaagcgaggcagaccgccaggcattactggaaaaaggtaatgtgcttatccgcgctctggagagcggaagccgcgtagggatggggatgcgaatgcaccatgtacagcaacaggcgcttctggaagagatggcgggacagccgggagtgttgtggttcgcagtcaccgatgcgcagggcatcattattcttcatagcgaccccgataaggtcgggcgtgcgctctatagcccggatgaaatgcagaaattaaagccagaggaaaactcccgctggcggctgcttgggaaaacggaaactacgcctgcacttgaggtctatcgtttgttccagccaatgagtgcgccctggcggcatggaatgcacaatatgccgcgctgtaacggcaaagctgtgccacaagtagatgcacaacaggctatttttatcgccgttgatgccagtgatctggttgcaacccagagtggggaaaagcgcaataccctgattatcctcttcgccctggcgacggtcttgctggcaagcgtattgagtttcttctggtatcgccgctatctgcgcagccgccagcttctacaagatgaaatgaagcgcaaagagaagctggtggcgctggggcatcttgcggcaggcgttgcccacgaaatccgtaacccactttccagcattaaaggactggcgaaatactttgccgagcgcgcgcctgcagggggagaagcgcatcaactggcgcaggtgatggcgaaagaggccgaccgtttaaaccgcgtggtaagcgagttgctggaactggttaagccaacgcatctggctttgcaggcggtggatctcaacacgctgattaaccacagtttacagctggtaagtcaggatgcaaacagccgggagatccagttacgctttaccgccaacgacacattaccggaaattcaggccgacccggacaggctgactcaggtcctgttgaatctctatctcaatgctattcaggcgattggtcagcatggcgtgattagcgtgacggccagcgaaagcggcgcgggcgtgaaaatcagcgttaccgacagcggtaagggaattgcggcagatcagcttgatgccatcttcactccgtacttcaccactaaagccgaaggcaccggattggggctggcggtcgtgcataatattgttgaacaacacggtggtacaattcaggtcgcaagccaggagggaaaaggcagtacgttcaccctctggcttccggtcaatattacgcgtaaggacccacaaggatgacgcacgataatatcgatattctggtggtggatgatgacattagccactgcactattttgcaggctttactgcgcggctggggctataacgtcgcgctggcgaacagcgggcgacaggcgttggagcaggtgcgggaacaggtttttgatcttgtgctttgcgatgtgcgaatggcggagatggacggcatcgccacgctgaaagagatcaaagcgttaaacccggcaattccggtgctgattatgactgcgtactccagcgtcgagacggcggtagaggcactgaaaactggggcgctggattatctcatcaagccgctggatttcgataacctacaggcgacgctggaaaaagcgctcgcgcatacgcacagtattgatgctgaaacacctgcggtgactgccagccagttcggtatggtcggtaaaagcccggcgatgcaacacctgctcagtgaaatcgccctcgtcgcgccaagcgaagccacggtactgatccacggcgattccggcaccggtaaagagctggtcgccagggcgattcacgccagtagcgcacgtagcgaaaaaccgctggtaacgctcaactgtgcggcactcaacgaatccttgctggaatctgaattgttcggtcacgaaaaaggggcgtttactggagccgataaacgccgggaagggcgctttgttgaggcggacggcggcacgctgtttctcgatgaaattggcgatatcagcccgatgatgcaggtgcgtctgctgcgtgcgattcaggagcgcgaagttcagcgtgtcggtagcaaccagattatcagcgttgatgtccggctgattgcggcgacccatcgcgatcttgccgcagaggtgaatgccgggcgttttcgccaggatctctactatcgcctgaatgtggtggcgattgaagtaccaagcctgcggcaacggcgggaagatatccctctgctggctggccattttctgcagcgctttgccgagcgtaatcgcaaggcggtaaaaggttttacgccccaggcgatggatctgttgattcattacgactggccgggaaatattcgtgagctggaaaacgcggtggaacgggcagtggtgctgctgaccggggaatatatttccgaacgcgagctgccgctggcgattgccagtacgccgatcccgctgggacaaagtcaggatattcagccgttggtggaagtggaaaaagaggtgattctggcggcgctggagaaaacgggcggcaacaaaaccgaagccgcccgtcagttagggatcacgcgcaaaacgctattggcaaaactgagccgttaattctgctcgcgttcgatagcgcgccagccgatatctttccggcagaagcagtcgtcccagtggatatcggtcattaaggcataggcgcgtttctgcgcttctgccacggtatgacccagcgcggtgacgcacagtacgcgcccgccgttggtcactacctgctcgtcatccgccagttttgtgcccgcgtggaacactttgccgcctgccacttcttccagcggcaggccgtggatcacgtcaccggtgcggtaatcacccggatatccacccgcagccatcaccacgccgagagaagcgcgttcatcccactcggacgttttctcgtccagtttgctttcacaggccgccaggcagagctcaaccagatcggacttcatgcgcagcataatcggctgggtttccggatcgccaaagcggcagttaaattcaataaccttcggattgccctgtttgtcgatcatcaggcccgcgtagagaaaaccggtgtaggtgttgccttccgccgccatgcctttcacggttggccagataatacgttccatggtgcgctgatgaacgtcatcggttactaccggcgcgggggagtaagcgcccatcccgccggtgtttggtccggtatctttatcgcctacgcgtttgtgatcctggctggtagccatcggcagcacatgctcgccgtccaccatcacgataaagctcgcttcttcgccatcgaggaactcttcgataacgatgcgatgacccgcgtcgccaaaagcgttgcccgccagcatatcgtgaacagccgcttccgcttcttccagcgtcatcgccacgataacgcctttcccggcagccagaccgtccgctttaatgacgattggcgcgcctttctcacgcagatacgccagcgcaggttctacctcggtgaagttctggtattccgccgtagggatcttatggcgggccaggaaatctttggtaaacgctttactgccttccagttgggccgcacctgcggttgggtcgaagattttcagcccggcggcgcggaaggtatcgaccacgcctttcaccagcggcgcttccgggccgacgatggtcagatcaatcttttcgttttgtgcgaaatccaacagcgccgggatatcggtcacgccaatagcaacgttttgcagcgcgggttccagtgcagtgcctgcattacccggagcaacaaaaacagtctcaaccagcgggctctgggccgctttccaggccagcgcgtgctcgcgcccgccgttaccaatcactaatactttcatctattgctccattaatggcggaagtggcgcatgtcggtgaagagcatcgcaataccgtgctcgtcggcggcggcaatcacttcgtcatcacggatagaaccgccaggctggattacgcaggtcacgcccgcagcggcggcggcatcaataccgtcgcggaacgggaagaacgcgtcagaagccatgctggaacctttcacttccaggccttcatcggccgctttaataccggcgatttttgcggagtacacgcggctcatctggcccgcgccaatgccgatagtcatattgtttttggcatagacgatagcgttggatttcacaaacttcgccaccttccagcagaacagcgcatcacgcagttcctgttcgctcggctgacgtttggtcaccacgcgcagttcttccgcaccgaccatccccaggtcacgatcctgaaccagcagaccgccgttcacgcgtttgaaatcgaggcccggaacacgctcgccccactgaccgcaggtcagaacgcgtacgttctgtttggcggcggtgattttcagggcttcttcgctggcggacggcgcaataatcacttcgacaaactgacgagaaatgatggcctgtgcggtttccgcatccagctcgcggttaaaggcaatgatgccgccgaatgcggaggttgggtcggttttgtacgcgcgatcgtaagcatcaagaatggaattgccgatagccacgccgcaagggttggcgtgcttcacaatcacacatgccggctcggcgaactctttcacgcactccagcgccgcatcggtatcggcgatgttgttataagagagggctttaccctgaacctgggttgcggtagcaacggaggcttctttcacattctcttctatatagaaggcagcctgctggtggctgttctcgccgtaacgcatatccagcttcttaatgaagttcaggttcagcgtgcgtgggaagcgaccggcggcttctttgctttcaccgtggtaagccggaaccatgctgccgaagtagttggcaatcatgctgtcgtaggcggcagtgtgttcgaaggctttgatggcgaggtcgaaacgggttgcaagcgtcaggcttccttcgttgtcatccatctctttaataatggcgtcatagtcgctgctcttcaccacgattgcgacatctttatggttcttggcggcggagcgcaccatcgttgggccgccgatatcgatgttctcaaccgcatcttccaggctgcaaccttcacgggccacggtctgggcgaacggatacaggttaacaaccaccatatcgataggctggatctgatgttcttccataatggcatcgtcctggccgcgacggcccagaatgccaccatgtactttcggatgcagggtcttcacgcgtccatccatcatctccgggaaaccggtgtaatcggaaacttcggttaccggcagacctttttctgctaacagacgggcagtgccccctgtagacagcagctccacaccgcgtgcggaaagtgcctgggcgaattcgacgataccggctttgtcagaaacactgagcagagcgcggcggactggacgacgttgttgcatggtaaatcccctggatttgactattacagagagcgttagctgaatttttcgcgaaaaactcagctaacgcccctaacggggcatccttatttttcgcccgcattgtaacgaaaacgtttgcgcaacgctcgcgaatttttctctttcaatggtgatcacaattttgactgtggttaccgtgggcaaaatacagaaattacattgatgattgtggataactctgtgcgtaaaaaggtataaagcgggcttttgctggggaatgcagcagtcagtcatttttctgcaatttttctattgcggcctgcggagaactccctataatgcgcctccatcgacacggcggatgtgaatcacttcacacaaacagccggttcggttgaagagaaaaatcctgaaattcagggttgactctgaaagaggaaagcgtaatatacgccacctcgcgacagtgcgctaaagcgcgtcgcaactgctctttaacaatttatcagacaatctgtgtgggcactcgaagatacggattcttaacgtcgcaagacgaaaaatgaataccaagtctcaagagtgaacacgtaattcattacgaagtttaattctttgagcatcaaacttttaaattgaagagtttgatcatggctcagattgaacgctggcggcaggcctaacacatgcaagtcgaacggtaacaggaagaagcttgcttctttgctgacgagtggcggacgggtgagtaatgtctgggaaactgcctgatggagggggataactactggaaacggtagctaataccgcataacgtcgcaagaccaaagagggggaccttcgggcctcttgccatcggatgtgcccagatgggattagctagtaggtggggtaacggctcacctaggcgacgatccctagctggtctgagaggatgaccagccacactggaactgagacacggtccagactcctacgggaggcagcagtggggaatattgcacaatgggcgcaagcctgatgcagccatgccgcgtgtatgaagaaggccttcgggttgtaaagtactttcagcggggaggaagggagtaaagttaatacctttgctcattgacgttacccgcagaagaagcaccggctaactccgtgccagcagccgcggtaatacggagggtgcaagcgttaatcggaattactgggcgtaaagcgcacgcaggcggtttgttaagtcagatgtgaaatccccgggctcaacctgggaactgcatctgatactggcaagcttgagtctcgtagaggggggtagaattccaggtgtagcggtgaaatgcgtagagatctggaggaataccggtggcgaaggcggccccctggacgaagactgacgctcaggtgcgaaagcgtggggagcaaacaggattagataccctggtagtccacgccgtaaacgatgtcgacttggaggttgtgcccttgaggcgtggcttccggagctaacgcgttaagtcgaccgcctggggagtacggccgcaaggttaaaactcaaatgaattgacgggggcccgcacaagcggtggagcatgtggtttaattcgatgcaacgcgaagaaccttacctggtcttgacatccacggaagttttcagagatgagaatgtgccttcgggaaccgtgagacaggtgctgcatggctgtcgtcagctcgtgttgtgaaatgttgggttaagtcccgcaacgagcgcaacccttatcctttgttgccagcggtccggccgggaactcaaaggagactgccagtgataaactggaggaaggtggggatgacgtcaagtcatcatggcccttacgaccagggctacacacgtgctacaatggcgcatacaaagagaagcgacctcgcgagagcaagcggacctcataaagtgcgtcgtagtccggattggagtctgcaactcgactccatgaagtcggaatcgctagtaatcgtggatcagaatgccacggtgaatacgttcccgggccttgtacacaccgcccgtcacaccatgggagtgggttgcaaaagaagtaggtagcttaaccttcgggagggcgcttaccactttgtgattcatgactggggtgaagtcgtaacaaggtaaccgtaggggaacctgcggttggatcacctccttaccttaaagaagcgttctttgcagtgctcacacagattgtctgatagaaagtgaaaagcaaggcgtcttgcgaagcagactgatacgtccccttcgtctagaggcccaggacaccgccctttcacggcggtaacaggggttcgaatcccctaggggacgccacttgctggtttgtgagtgaaagtcacctgccttaatatctcaaaactcatcttcgggtgatgtttgagatatttgctctttaaaaatctggatcaagctgaaaattgaaacactgaacaacgaaagttgttcgtgagtctctcaaattttcgcaacacgatgatgaatcgtaagaaacatcttcgggttgtgaggttaagcgactaagcgtacacggtggatgccctggcagtcagaggcgatgaaggacgtgctaatctgcgataagcgtcggtaaggtgatatgaaccgttataaccggcgatttccgaatggggaaacccagtgtgtttcgacacactatcattaactgaatccataggttaatgaggcgaaccgggggaactgaaacatctaagtaccccgaggaaaagaaatcaaccgagattcccccagtagcggcgagcgaacggggagcagcccagagcctgaatcagtgtgtgtgttagtggaagcgtctggaaaggcgcgcgatacagggtgacagccccgtacacaaaaatgcacatgctgtgagctcgatgagtagggcgggacacgtggtatcctgtctgaatatggggggaccatcctccaaggctaaatactcctgactgaccgatagtgaaccagtaccgtgagggaaaggcgaaaagaaccccggcgaggggagtgaaaaagaacctgaaaccgtgtacgtacaagcagtgggagcacgcttaggcgtgtgactgcgtaccttttgtataatgggtcagcgacttatattctgtagcaaggttaaccgaataggggagccgaagggaaaccgagtcttaactgggcgttaagttgcagggtatagacccgaaacccggtgatctagccatgggcaggttgaaggttgggtaacactaactggaggaccgaaccgactaatgttgaaaaattagcggatgacttgtggctgggggtgaaaggccaatcaaaccgggagatagctggttctccccgaaagctatttaggtagcgcctcgtgaattcatctccgggggtagagcactgtttcggcaagggggtcatcccgacttaccaacccgatgcaaactgcgaataccggagaatgttatcacgggagacacacggcgggtgctaacgtccgtcgtgaagagggaaacaacccagaccgccagctaaggtcccaaagtcatggttaagtgggaaacgatgtgggaaggcccagacagccaggatgttggcttagaagcagccatcatttaaagaaagcgtaatagctcactggtcgagtcggcctgcgcggaagatgtaacggggctaaaccatgcaccgaagctgcggcagcgacgcttatgcgttgttgggtaggggagcgttctgtaagcctgcgaaggtgtgctgtgaggcatgctggaggtatcagaagtgcgaatgctgacataagtaacgataaagcgggtgaaaagcccgctcgccggaagaccaagggttcctgtccaacgttaatcggggcagggtgagtcgacccctaaggcgaggccgaaaggcgtagtcgatgggaaacaggttaatattcctgtacttggtgttactgcgaaggggggacggagaaggctatgttggccgggcgacggttgtcccggtttaagcgtgtaggctggttttccaggcaaatccggaaaatcaaggctgaggcgtgatgacgaggcactacggtgctgaagcaacaaatgccctgcttccaggaaaagcctctaagcatcaggtaacatcaaatcgtaccccaaaccgacacaggtggtcaggtagagaataccaaggcgcttgagagaactcgggtgaaggaactaggcaaaatggtgccgtaacttcgggagaaggcacgctgatatgtaggtgaggtccctcgcggatggagctgaaatcagtcgaagataccagctggctgcaactgtttattaaaaacacagcactgtgcaaacacgaaagtggacgtatacggtgtgacgcctgcccggtgccggaaggttaattgatggggttagcgcaagcgaagctcttgatcgaagccccggtaaacggcggccgtaactataacggtcctaaggtagcgaaattccttgtcgggtaagttccgacctgcacgaatggcgtaatgatggccaggctgtctccacccgagactcagtgaaattgaactcgctgtgaagatgcagtgtacccgcggcaagacggaaagaccccgtgaacctttactatagcttgacactgaacattgagccttgatgtgtaggataggtgggaggctttgaagtgtggacgccagtctgcatggagccgaccttgaaataccaccctttaatgtttgatgttctaacgttgacccgtaatccgggttgcggacagtgtctggtgggtagtttgactggggcggtctcctcctaaagagtaacggaggagcacgaaggttggctaatcctggtcggacatcaggaggttagtgcaatggcataagccagcttgactgcgagcgtgacggcgcgagcaggtgcgaaagcaggtcatagtgatccggtggttctgaatggaagggccatcgctcaacggataaaaggtactccggggataacaggctgataccgcccaagagttcatatcgacggcggtgtttggcacctcgatgtcggctcatcacatcctggggctgaagtaggtcccaagggtatggctgttcgccatttaaagtggtacgcgagctgggtttagaacgtcgtgagacagttcggtccctatctgccgtgggcgctggagaactgaggggggctgctcctagtacgagaggaccggagtggacgcatcactggtgttcgggttgtcatgccaatggcactgcccggtagctaaatgcggaagagataagtgctgaaagcatctaagcacgaaacttgccccgagatgagttctccctgactccttgagagtcctgaaggaacgttgaagacgacgacgttgataggccgggtgtgtaagcgcagcgatgcgttgagctaaccggtactaatgaaccgtgaggcttaaccttacaacgccgaaggtgttttggcggattgagagaagattttcagcctgatacagattaaatcagaacgcagaagcggtctgataaaacagaatttgcctggcggcagtagcgcggtggtcccacctgaccccatgccgaactcagaagtgaaacgccgtagcgccgatggtagtgtggggtctccccatgcgagagtagggaactgccaggcatcaaattagaaaaaccccggtccataaggccggggttttttgcatatcaattatttgcatgatgaagggaatctcatgagtgttctgtatatccaaattcgtcgtaatcaaattactgttcgcgatcttgaaagcaaacgtgaagtgagtggagacgctgccttcagtaaccagcgcctgttaatcgccaatttctttgttgcagaaaaagttctgcaagatcttgttctgcaactccacccacgtagtacctggcattcttttttgccagcaaaacgtatggatattgttgtgagcgcactggaaatgaatgagggcggtttgagtcaggttgaggaacgcattctccatgaagtggtcgctggggcaacgttaatgaaatatcgccagttccacatccatgcgcaaagtgcggtactcagtgatagtgcggtcatggcaatgcttaagcagaaataatcgtgtcaccattggtgggtactaaacctgaagttcagcccaccgggatgagaaaaaatcgcttacgcccccacatacgccagattcagcaacggatacggtttccccaaatcgtccacctcagagcgtcccgtaaccttaaaacccaccttcttatagaacccaaccgcctgctcattttgctcattaacgttggttgtcagttccggtgccatgctgagcgcatgctccaccagcacccgacctacgccgcagccgcgcacatcaggatcgataaacagcgcatccatatgctgcccacttagcaacataaatccaaccggctgatcccgctcattaaccgcgacccacaacggcgcttccggcaggaaggaacgaactaggtcctccagctcggtccgatactctgcacttagaaaatcgtgagtggcatcgacagaacgacaccaaatcgcaacgagttcctccccttcctcatgccgactgcggcgaatactaataaccattttctctccttttagtcattcttatattctaacgtagtcttttccttgaaactttctcaccttcaacatgcaggctcgacattggcaaattttctggttatcttcagctatctggatgtctaaacgtataagcgtatgtagtgaggtaatcaggttatgccgattcgtgtgccggacgagctacccgccgtcaatttcttgcgtgaagaaaacgtctttgtgatgacaacttctcgtgcgtctggtcaggaaattcgtccacttaaggttctgatccttaacctgatgccgaagaagattgaaactgaaaatcagtttctgcgcctgcttagtaacagtcctttgcaggtcgatattcagctgttgcgcatcgattcccgtgaaagccgcaacacgcccgcagagcatctgaacaacttctactgtaactttgaagatattcaggatcagaactttgacggtttgattgtaactggtgcgccgctgggcctggtggagtttaatgatgtcgcttactggccgcagatcaaacaggtgctggagtggagcaaagatcacgtcaccagcacgctgtttgtctgctgggcggtacaggccgcgctcaatatcctctacggcattcctaagcaaactcgcaccgaaaaactctctggcgtttacgagcatcatattctccatcctcatgcgcttctgacgcgtggctttgatgatagtttcctggcaccgcatagccgctatgctgactttccggcagcgttgattcgtgattacaccgatctggaaattctggcagagacggaagaaggggatgcatatctgtttgccagtaaagataagcgcattgcctttatgacgggccatcccgaatatgatgcgcaaacgctggcgcaggaatttttccgcgatgtggaagccggactagacccggatgtaccgtataactatttcccgcacaatgatccgcaaaatacaccgcgagcgagctggcgtagtcacggtaatttactgtttaccaactggctcaactattacgtctaccagatcacgccatacgatctacggcacatgaatccaacgctggattaatcttctgtgatagtcgatcgttaagcgattcagcaccttacctcaggcaccttcgggtgccttttttatttccgaaacgtacctcagcaggtgaataaattttattcatattgttatcaacaagttatcaagtatttttaattaaaatggaaattgtttttgattttgcattttaaatgagtagtcttagttgtgctgaacgaaaagagcacaacgatccttcgttcacagtggggaagttttcggatccatgacgaggagctgcacgatgactgaacaggcaacaacaaccgatgaactggctttcacaaggccgtatggcgagcaggagaagcaaattcttactgccgaagcggtagaatttctgactgagctggtgacgcattttacgccacaacgcaataaacttctggcagcgcgcattcagcagcagcaagatattgataacggaacgttgcctgattttattagcgaaacagcttccattcgcgatgctgattggaaaattcgcgggattcctgcggacttagaagaccgccgcgtagagataactggcccggtagagcgcaagatggtgatcaacgcgctcaacgccaatgtgaaagtctttatggccgatttcgaagatagtctggcaccagactggaacaaagtgatcgacgggcaaattaacctgcgtgatgcggttaacggcaccatcagttacaccaatgaagcaggcaaaatttaccagctcaagcccaatccagcggttttgatttgtcgggtacgcggtctgcacttgccggaaaaacatgtcacctggcgtggtgaggcaatccccggcagcctgtttgattttgcgctctatttcttccacaactatcaggcactgttggcaaagggcagtggtccctatttctatctgccgaaaacccagtcctggcaggaagcggcctggtggagcgaagtcttcagctatgcagaagatcgctttaatctgccgcgcggcaccatcaaggcgacgttgctgattgaaacgctgcccgccgtgttccagatggatgaaatccttcacgcgctgcgtgaccatattgttggtctgaactgcggtcgttgggattacatcttcagctatatcaaaacgttgaaaaactatcccgatcgcgtcctgccagacagacaggcagtgacgatggataaaccattcctgaatgcttacagtcgcctgttgattaaaacctgccataaacgcggtgcttttgcgatgggcggcatggcggcgtttattccgagcaaagatgaagagcacaataaccaggtgctcaacaaagtaaaagcggataaaagcctggaagccaataacggtcacgatggcacatggatcgctcacccaggccttgcggacacggcaatggcggtattcaacgacattctcggctcccgtaaaaatcagcttgaagtgatgcgcgaacaagacgcgccgattactgccgatcagctgctggcaccttgtgatggtgaacgcaccgaagaaggtatgcgcgccaacattcgcgtggctgtgcagtacatcgaagcgtggatctctggcaacggctgtgtgccgatttatggcctgatggaagatgcggcgacggctgaaatttcccgtaccagcatctggcagtggatccatcatcaaaaaacgttgagcaatggcaaaccggtgaccaaagccttgttccgccagatgctgggcgaagagatgaaagtcattgccagcgaactgggcgaagaacgtttctcccaggggcgttttgacgatgccgcacgcttgatggaacagatcaccacttccgatgagttaattgatttcctgaccctgccaggctaccgcctgttagcgtaaaccaccacataactatggagcatctgcacatgaaaacccgtacacaacaaattgaagaattacagaaagagtggactcaaccgcgttgggaaggcattactcgcccatacagtgcggaagatgtggtgaaattacgcggtagtgtcaatcctgaatgcacgctggcgcaactgggcgcagcgaaaatgtggcgtctgctgcacggtgagagcaaaaaaggctacatcaacagcctcggcgcactgactggcggtcaggcgctgcaacaggcgaaagcgggtattgaagcagtctatctgagcggatggcaggtagcggcggacgctaacctggcggccagcatgtatccggatcagagcctctatccggcaaacagcgtgccagctgtggtggagcggatcaacaacaccttccgtcgtgccgatcagatccaatggtccgcgggcattgagccgggcgatccgcgctatgtcgattacttcctgccgatcgttgccgatgcggaagccggttttggcggtgtcctgaatgcctttgaactgatgaaagcgatgattgaagccggtgcagcggcagttcacttcgaagatcagctggcgagtgtgaagaaatgcggtcacatgggcggcaaagttttagtgccaactcaggaagctattcagaaactggtcgcggcgcgtctggcagctgacgtgacgggcgttccaaccctgctggttgcccgtaccgatgctgatgcggcggatctgatcacctccgattgcgacccgtatgacagcgaatttattaccggcgagcgtaccagtgaaggcttcttccgtactcatgcgggcattgagcaagcgatcagccgtggcctggcgtatgcgccatatgctgacctggtctggtgtgaaacctccacgccggatctggaactggcgcgtcgctttgcacaagctatccacgcgaaatatccgggcaaactgctggcttataactgcagcccgagcttcaactggcagaaaaacctcgacgacaaaactattgccagcttccagcagcagctgagcgatatgggctacaagttccagttcatcaccctggcaggtatccacagcatgtggttcaacatgtttgacctggcaaacgcctatgcccagggcgagggtatgaagcactacgttgagaaagtgcagcagccggaatttgccgccgcgaaagatggctataccttcgtatctcaccagcaggaagtgggtacaggttacttcgataaagtgacgactattattcagggcggcacgtctagtgtcaccgcgctgaccggctccactgaagaaagccagttctaagcaacaacaaccgttgctgactgtaggccggataaggcgttcacgccgcatccggcaatcggtgcacgatgcctgatgcgacgcttgcgcgtcttatcatgcctacagccgttgccgaacgtaggctggataaggcgtttacgccgcatccggcaattctctgctcctgatgagggcgctaaatgccgcgtggcctggaattattgattgctcaaaccattttgcaaggcttcgatgctcagtatggtcgattcctcgaagtgacctccggtgcgcagcagcgtttcgaacaggccgactggcatgctgtccagcaggcgatgaaaaaccgtatccatctttacgatcatcacgttggtctggtcgtggagcaactgcgctgcattactaacgaccaaagtacggacgcggcatttttactacgtgttaaagagcattacacccggctgttgccggattacccgcgcttcgagattgcggagagcttttttaactccgtgtactgtcggttatttgaccaccgcagccttactcccgagcggctttttatctttagctctcagccagagcgccgctttcgtaccattccccgcccgctggcgaaagactttcaccccgatcacggctgggaatctctactgatgcgcgttatcagcgacctaccgctgcgcctgcgctggcagaataaaagccgtgacatccattacattattcgccatctgacggaaacgctggggacagacaacctcgcggaaagtcatttacaggtggcgaacgaactgttttaccgcaataaagccgcctggctggtaggcaaactgatcacaccttccggcacattgccatttttgctgccgatccaccagacggacgacggcgagttatttattgatacctgcctgacgacgaccgccgaagcgagcattgtttttggctttgcgcgttcttattttatggtttatgcgccgctgcccgcagcgctggtcgagtggctacgggaaattctgccaggtaaaaccaccgctgaattgtatatggctatcggctgccagaagcacgccaaaaccgaaagctaccgcgaatatctcgtttatctacagggctgtaatgagcagttcattgaagcgccgggtattcgtggaatggtgatgttggtgtttacgctgccgggctttgatcgggtattcaaagtcatcaaagacaggttcgcgccgcagaaagagatgtctgccgctcacgttcgtgcctgctatcaactggtgaaagagcacgatcgcgtgggccgaatggcggacacccaggagtttgaaaactttgtgctggagaagcggcatatttccccggcattaatggaattactgcttcaggaagcagcggaaaaaatcaccgatctcggcgaacaaattgtgattcgccatctttatattgagcggcggatggtgccgctcaatatctggctggaacaagtggaaggtcagcagttgcgcgacgccattgaagaatacggtaacgctattcgccagcttgccgctgctaacattttccctggcgacatgctgtttaaaaacttcggtgtcacccgtcacgggcgtgtggttttttatgattacgatgaaatttgctacatgacggaagtgaatttccgcgacatcccgccgccgcgctatccggaagacgaacttgccagcgaaccgtggtacagcgtcagcccgggcgatgttttcccggaagagtttcgccactggctatgcgccgacccgcgtattggtccgctgtttgaagagatgcacgccgacctgttccgcgctgattactggcgcgcactacaaaaccgcatacgtgaagggcatgtggaagatgtttatgcgtatcggcgcaggcaaagatttagcgtacggtatggggagatgcttttttgagtaaagcttccatataatttttctccgcaatgtatcgagggttatccgtaaagccaaagctttcagccatcttatttaatgtattaaggattaattcagcaataacccggtgaccaaattcaaaagccaactcaaaggcagagtatttttgtggggctttgtgttgccaaaaatccataatatcttcagcggtaaatccaaacaggcgtgcatggtcagataaagcaagataaaccgtctctacaacattttgttgtttatgctgtatcgcactaaacaaaccgggatattcattagaattatttgccaggaggaggggcttcatattttttttatcgaatttaaacgtattaaacagagtgggtaatgcgttaaaaatagtattaataacgttcatgtgtccgcgctgcatggccataaacaaacccgtgtcgcgcgcaagacttttagcggtcagaagatctacaatatcggaagcactaatgttaatttcctgggctaggctgggcaatgcttcaagaataactttcacgatatcgctatgtccattttgcatcgccagatatagtcctgggcaaccataaaaatcctttgccttcaggagatcgagtacctgttctttagtcaaatgacatgtgcgaattaacaaaggtaacgcgttcaaaacaattttcagcatgtcggcatcaccattcgccataacatggtataaaacatggctggacgttctatttttggcactcaggaatttatacacttgttcgttatctaaatgatgtgttgcggccagtttaggtaaggcgttcagaatgctggttacaacatttttatccttacgacttatcgctaaaaataatccagaaaaaccatttttatcttttgcctccagaatatgcatgagattttttttgctgagtaatccttcatatcctgtttcactcaaactattgaaaatagtctcaacgatatccgcattaccataatttatagccaaatataaacctggcaggttaatactattataggcagtcaacatttctgttctatgtagttctggcattttctggagttgaatcatcagttgcgtaagttggtgattctgaccaattgccattagcaaattcatcgttgcaggacttaatggaggggttatttcatccacagatccttttaacatcaatagctgttctttcggaagtgctggaattattgcaacagattgattaataacatgatcattactccatttcaggaggctataatctacattcataaaatccatcagagaatagtgtttaatattctctttgctttcgctcataattcttattttatcgttagttacattaggatcataaacgctaaccacgtaatgggtacatccttcagttgtgttctttattcttagccggaccgtcaaagcatggttatccaccagtaatatggctgccataacactgatgccattactttccatcttgtcaaaatatgctttcataactagcccgaaatcaccgcaggcagcaacgcaacgcccctcaggacggctggaaaccaacgccaaagtctggtttttgcattttttgttgaagtgcgtgagaaatttttcagcactagagtaatcatcttgatggggtttgtaatcaacattctgataaatatcattaatatattgtgcagcaatgtgtcggcatactatacggttttggggtcgccccggaaaataacattgaccattaagtttaattcttgggaattctttttcttttctatcactttttaggtttaattcttgtttatcaagagtgtcactgcgttgaggtaaaatttccattaggtatttttcaaatattggggcaatggtttgagtaagtgtcgtgttttcgtttttattaattatcgtaatttctttcttatcagcttgtaagacggacgtggaaaatttaatgacaaaatccttgttgctaaagatatgacgaccattttgtctacagttctcactgaagctttttaatagaggcgtcgccagctccttgccagaaaatttatcctcgagttctttataaaacaattcactcagggtttggtgttcatttgtctgggctgtattattaatatttgcagagaaagaactacgaggaatacgagtaatcatttaaatatctcattgtttattgatgtcttgaattttaactatcagaacagtgaaaaaatttaatatgattacaactaaagaaatatcataaatcgctcaatctcataatgcagccgtaaaagtttcggtggaatgagatcttgcgattttgttaataattaagtggtttgatgtttaaaaataatgctgagttaataaaagtgtgtgaagtgtatgacattaagttattttggcgtcaatgcgattaacagacacccttattctattgccactcaggtatgatgggcagaatattgcctctgcccgccagaaaaagtcagcgcattccaccgtacgccagcgtcacttccttcgccgctttaatcaccatcgcgccaaactcggtcacgcggtcatcggtaatacgactaatcggtccggaaatagaaattgcggcaaacggttcacggtgctcatcgaaaatacacgctgcaaggcaacgtagccccagtgcatgttcctcatcgtcaaaactataaccccgtttgcgcgtttgggcgagatcttcttttaaatgcacaggagacaccagcgttgcgtgggtataggcatgtaaccctttgcggtgcagcagcttcgtcacctgttcttcgctcagttgggctaaaaaggctttacccgcaccggaagcgtgcatcggcaatttaccgccgataggcgcggacattcgcatcagatgcgtacactgtacctggtcgataataatcgcttcgtgatcgctttgatcaagcaccgccatattgaccgtttcgccagactcttccattagattgcgcaggatagggtgaacaatcgctaacaaattacggctctggagaaagctgctgccgaccataaaggcatgtgcgccgattgcccaatgtcccagttcgccaacctgacgcacgaaaccctgctgttgcatcgtggttagcaggcggtgggtcgtggaattgggtaacccggcttgttgcgccagttccgtgagtgccacactgccattggattcggcaatccactccagtaatttcaggccacgcgttaaagactgaacctgtccagtcgctggtgcggtggcaacggcgggttttctgccgcgtttcgcgggaatgggtgcgaccatgacagtctcttttttctgtatcgtggaaatcattttcatttttattgttagctaatgcaatagttactgaactgatccgatgagttaatgttgaacaaatctcatgttgcgtggtggtcgcttttaccacagatgcgtttatgccagtatggtttgttgaatttttattaaatctgggttgagcgtgtcgggagcaagtgtgagcagcaaagtggaacaactgcgtgcgcagttaaatgaacgtattctggtgctggacggcggtatgggcaccatgatccagagttatcgactgaacgaagccgattttcgtggtgaacgctttgccgactggccatgcgacctcaaaggcaacaacgacctgctggtactcagtaaaccggaagtgatcgccgctatccacaacgcctactttgaagcgggcgcggatatcatcgaaaccaacaccttcaactccacgaccattgcgatggcggattaccagatggaatccctgagcgcggaaatcaactttgcggcggcgaaactggcgcgagcttgtgctgacgagtggaccgcgcgcacgccagagaaaccgcgctacgttgccggtgttctcggcccgaccaaccgcacggcgtctatttctccggacgtcaacgatccggcatttcgtaatatcacttttgacgggctggtggcggcttatcgagagtccaccaaagcgctggtggaaggtggcgcggatctgatcctgattgaaaccgttttcgacacccttaacgccaaagcggcggtatttgcggtgaaaacggagtttgaagcgctgggcgttgagctgccgattatgatctccggcaccatcaccgacgcctccgggcgcacgctctccgggcagaccaccgaagcattttacaacagtttgcgccacgccgaagctctgacctttggcctgaactgtgcgctggggcccgatgaactgcgccagtacgtgcaggagctgagtcggattgcggaatgctacgtcaccgcgcacccgaacgccgggctacccaacgcctttggtgagtacgatctcgacgccgacacgatggcaaaacagatacgtgaatgggcgcaagcgggttttctcaatatcgtcggcggctgctgtggcaccacgccacaacatattgcagcgatgagtcgtgcagtagaaggattagcgccgcgcaaactgccggaaattcccgtagcctgccgtttgtccggcctggagccgctgaacattggcgaagatagcctgtttgtgaacgtgggtgaacgcaccaacgtcaccggttccgctaagttcaagcgcctgatcaaagaagagaaatacagcgaggcgctggatgtcgcgcgtcaacaggtggaaaacggcgcgcagattatcgatatcaacatggatgaagggatgctcgatgccgaagcggcgatggtgcgttttctcaatctgattgccggtgaaccggatatcgctcgcgtgccgattatgatcgactccagtaaatgggacgtcattgaaaaaggtctgaagtgtatccagggcaaaggcattgttaactctatcagcatgaaagagggcgtcgatgcctttatccatcacgcgaaattgttgcgtcgctacggtgcggcagtggtggtaatggcctttgacgaacagggacaggccgatactcgcgcacggaaaatcgagatttgccgtcgggcgtacaaaatcctcaccgaagaggttggcttcccgccagaagatatcatcttcgacccaaacatcttcgcggtcgcaactggcattgaagagcacaacaactacgcgcaggactttatcggcgcgtgtgaagacatcaaacgcgaactgccgcacgcgctgatttccggcggcgtatctaacgtttctttcagcttccgtggcaacgatccggtgcgcgaagccattcacgcagtgttcctctactacgctattcgcaatggcatggatatggggatcgtcaacgccgggcaactggcgatttacgacgacctacccgctgaactgcgcgacgcggtggaagatgtgattcttaatcgtcgcgacgatggcaccgagcgtttactggagcttgccgagaaatatcgcggcagcaaaaccgacgacaccgccaacgcccagcaggcggagtggcgcagctgggaagtgaataaacgtctggaatacagcctggtcaaaggcattaccgagtttatcgagcaggataccgaagaagcccgccagcaggctacgcgcccgattgaagtgattgaaggcccgttgatggacggcatgaatgtggtcggcgacctgtttggcgaagggaaaatgttcctgccacaggtggtcaaaagcgcgcgcgtcatgaaacaggcggtggcctacctcgaaccgtttattgaagccagcaaagagcagggcaaaaccaacggcaagatggtgatcgccaccgtgaagggcgacgtccacgacatcggtaaaaatatcgttggtgtggtgctgcaatgtaacaactacgaaattgtcgatctcggcgttatggtgcctgcggaaaaaattctccgtaccgctaaagaagtgaatgctgatctgattggccttagcgggcttatcacgccgagcctggacgagatggttaacgtggcgaaagagatggagcgtcagggcttcactattccgttactgattggcggcgcgacgaccagtaaagcgcacacggcggtgaaaatcgagcagaactacagcggcccgacggtgtatgtgcagaatgccagccgtaccgttggtgtggtggcggcgctgctttccgatacccagcgcgatgattttgtcgctcgtacccgcaaggagtacgaaaccgtacgtattcagcacgggcgcaagaaaccgcgcacaccaccggtcacgctggaagcggcgcgcgataacgatttcgcttttgactggcaggcttacacgccgccggtggcgcaccgtctcggcgtgcaggaagtcgaagccagcatcgaaacgctgcgtaattacatcgactggacaccgttctttatgacctggagcctggccgggaagtatccgcgcattctggaagatgaagtggtgggcgttgaggcgcagcggctgtttaaagacgccaacgacatgctggataaattaagcgccgagaaaacgctgaatccgcgtggcgtggtgggcctgttcccggcaaaccgtgtgggcgatgacattgaaatctaccgtgacgaaacgcgtacccatgtgatcaacgtcagccaccatctgcgtcaacagaccgaaaaaacaggcttcgctaactactgtctcgctgacttcgttgcgccgaagctttctggtaaagcagattacatcggcgcatttgccgtgactggcgggctggaagaggacgcactggctgatgcctttgaagcgcagcacgatgattacaacaaaatcatggtgaaagcgcttgccgaccgtttagccgaagcctttgcggagtatctccatgagcgtgtgcgtaaagtctactggggctatgcgccgaacgagaacctcagcaacgaagagctgatccgcgaaaactaccagggcatccgtccggcaccgggctatccggcctgcccggaacatacggaaaaagccaccatctgggagctgctggaagtggaaaaacacactggcatgaaactcacagaatctttcgccatgtggcccggtgcaagcgttagcggttggtacttcagccacccggacagcaagtactacgctgtagcacaaattcagcgcgatcaggttgaagattatgcccgccgtaaaggtatgagcgttaccgaagttgagcgctggctggcaccgaatctggggtatgacgcggactgattcacaaatctgtcacttttccttacaacaaacagggcgctcaatgagtgccctgtctctttattaatatgaaacacttatactggaaacaggctggaataatcttagccggaaaaacgaatgtcaaaaggcacagtaaagatgccagtcagcgtgtttccggtcctttggtcattcaattgcttcaggaacatataacgataaggagaacctgaactcgtgttaacgctgcttcacctgctttctgccgtcgccctgctggtctgggggactcatattgttcgaaccggcgtaatgcgcgtcttcggcgcgcgtttgcgtactgtccttagccggagcgtcgaaaaaaagccgctcgccttttgcgcggggatcggcgttaccgcactggtacagagcagtaatgccaccaccatgctggtgaccagctttgtcgctcaggatctggtagccctcgcaccggctctggtcattgtgctgggtgcagatgtcgggacggcgctaatggcgcgtattctcaccttcgacttatcctggctgagtccgttacttatttttatcggcgtgatttttttcctcggacgcaaacagagtcgcgccgggcaactgggccgcgtcggtattggtcttgggctgattttgctagcgctggagttgattgtgcaggccgtaacgccgatcacccaggcaaacggcgttcaggtgatctttgccagcctgaccggcgatattctgctggatgcgctgattggcgcgatgttcgccattatcagctactccagccttgctgctgtactgctgaccgcgactctgaccgccgcaggcattatctccttccccgtggcgctctgtctggtgattggtgctaacctcggttccggtctgctggcaatgctcaacaacagtgccgccaatgccgcagcccgccgtgtcgcgctgggtagtctgctgtttaagctggtgggtagcctgattatcctgccgtttgtccatttgctggcagagacaatggggaagttgagtttgccaaaagcggaactggtgatctatttccacgtcttctacaaccttgtacgttgcctggtcatgctgccatttgttgacccgatggcacggttttgcaaaacgattattcgcgatgaaccggaactggatacccagctacggcctaaacatctggatgtcagcgcgctggatacgcccacgcttgctctggcgaacgccgcgcgcgaaaccctgcgcattggcgacgccatggaacagatgatggaagggttgaataaagtgatgcacggtgagccacggcaggagaaagagctgcgtaagctggcagatgatatcaacgttctctacaccgccattaagctgtatctggcgcggatgccaaaagaagagctggcggaggaagagagccgccgctgggcagagatcatcgaaatgagcctcaaccttgaacaggcctccgatatcgtcgagcgcatgggcagcgaaattgctgacaaaagtctggcagcacggcgggcatttagccttgatgggttgaaggaactggatgcgctctatgagcaattgctcagtaatttaaagctggcaatgagcgtgttcttctctggcgatgtcaccagcgctcgtcgtttgcgtcgcagcaaacatcgttttcgcattcttaatcgccgctattcccacgcccacgtcgatcgcctgcatcagcaaaacgtgcagagcattgaaaccagtagcctacatttaggcttactgggagatatgcagcgcctgaacagcctgttttgtagcgtggcttacagtgtgctggaacagccggatgaagatgaaggacgggacgagtattaatattgtgaatcctgtaggcctgataagacgcgtcaagcgtcgcatcaggcactatgaacaagatgccggatcatgcatccggcaattcacttaaaaacggtgaccagcttccagcggaaccgcttcttcaccagccttaaacacataagtggtgttcgggccacccagcgtagcgtgacctttactcactgtgatccagttaccttccggtagaccaataatcgtcagttctggcgcgacgaccagcagttcgcgaatacgctgctcacgggtttcacctttatggccttccggcagcgcgttggtgaagtgcgggttgatttgcagcgggaacagatttagcgcatcgaaaccttgcggatcgacaatcggcatatcgttggtggtacgaatagttgggcaagcaaggttagcgcctgcgctccagccaatatacagagcgccacgtttaaccacgtcagtaattggtgccagcagcccgcgctcgcggcactgtttcagcaactggaaagtattcccgccgccgacaatcacgatctcagcattttcaatcgcggcaacgggatcgacaacgctatgaataccggtgacagaaacacccagcggagcgagaaccgcagccgttttcgctgtgtaatcatcccaggtctgcgttacgccagcgaaagggataaacaccgcactgcggcgaccctgcaactgttcagcaattagcggcagtgcatgttccagccaggctttacccggcagcgtgctgttactcaataaaagcagttccattacttctccggttagtaagaaatcacgggaggcatgctaccactgcgaatttaaccacttactgacatggctcacgatgtcgcacattgcttctggaaagtgatttgagcaggtaacgaattcaagccaatggaaataacaaatagttcgctcatgactattttttatcaacccaaaggtacggtatattccgttttttacaggagaatttatgctgcccgacagtagtgtccgtttaaataaatacatcagcgaaagcggaatttgcagtcgccgcgaagcggatcgctatatcgagcaaggcaatgtgttccttaatggcaagcgagccaccattggcgatcaggtgaaacccggcgacgttgtgaaagtaaacggtcagttgattgaacctcgggaagccgaagatttggtacttatcgccctgaacaagcccgttggtattgtaagcaccaccgaagatggcgagcgcgataacattgtcgatttcgttaaccacagcaaacgcgtgttcccgattggccgcctggataaagactcccaggggctgattttcctcaccaatcacggcgatctggtgaataagatcctgcgtgctggcaatgatcatgagaaagagtatctggtgacggtcgataaaccgattaccgaggagtttattcgcggcatgagtgcgggggtgccaatcctcgggacagtgaccaaaaagtgcaaagttaaaaaagaagcgccgtttgtcttccgcattaccctggtgcaggggctgaaccgtcagatccggcgcatgtgcgagcatttcggctatgaagtgaaaaagctggaacgcacgcgcatcatgaacgttagcttaagcggcattccgctgggggaatggcgcgatttaaccgacgatgagttaatcgacctctttaagctcattgaaaattcctcttccgaggtaaaacctaaagcgaaggccaaaccgaaaacagcgggcatcaaacgtccagtcgttaagatggaaaaaacggcggaaaaaggcggtcgcccggcgtccaacggtaagcgttttaccagcccggggcgtaaaaagaaggggcgctgattaacgcctcagactgatgaaaacggcccaaaagtgcccggacagtcccctcgccccttcgggaaaagggttagggtgaggggaaaattgtgttcacactgacgagtgaaaatctcaggcgttgattgtggattagcgcctgccgcgcgtgctcgtatttgcactccagctaaaactcgcttcaggatccggtttataagcctgctttttcttcaactggcgggcttttttcgcttcagcctcacgctcaaccattaatttatcgatgtaatctttcttaatgctgttggtttcggagttggtcaatacgcgaccatgcgcaatccgcgcccgatccagcagtgttttaagttcacgctgctcgcgttcagtcatctctttttgggtaatacgggggagtgccatgatggtgccctcagtgagccagagagttcagtgtacgggaattcgtttgcgagcagaactgataatattcattttgccttctcttaactatttatctctttcgataattaattagagatgcagataaaaaaattaaaggcaattattctccgataaagacgctggttaacagagtacaggctcgtttattgatgagcatagtgacaagaaaatcaatacggcccgaaatatagcttccaggccatacagtatttactcaaacaaattactatgcagtttttgcaccacctgctcggcatcttcgccgggcaccaggaagcacaggttatggctggatgcgccataacaaatcatgcgaatgttgaacggttccagtacgccgaatacctctttgccaacgccgcaggctttactcaggtcattgccaatcaacgcgaccagcgccagaccttcttccacctccacccgacacagtgcggaaagctccatcagcagagattgcgtcagcaacgtatcgccagtggaggtactaccggtggtatcaagggttaatgccacgctcacttcactcgtggtgattaagtctacgctaatattatgccgcgcgaggatgccgaaaacttccgcgaggaaaccgcgagaatgcagcatattcaggctgtgcaaagtgagcagagtctgattgcgacgaagcgccagagcgcggaacagcggcggattttcagttttattgcacaccagcgtaccacctgcgcgtgggtctttgctggagccgacaaagaccgggatatcgctgcgtactgcgggtagcaacgttgccggatgcagtacttttgcaccaaaagttgccatctctgccgcttcggcaaacgcgatttcatcaatgcgttttgctgcggaaactacgcgtggatcggtggtgtagatgcccgggacgtcggtccagatatcaacacgagatgcgtgtaaagcctccgccagcaaggctgccgtataatcgctgcctccacggccaagcgtcgttgtacgacctttattttcgctaccgataaatccctgggtgatcactaagccttcattgagacgtgggagcagctgcagcgcggccagttccgccagcgcggctatatctggctctgcacgaccaaatcggtcgttggtacgcatcactttacgtacatcaaaccactgtgcctgaacatcgcgttcgcgcaggatctcaacaaacagcagggtgctcatcagctcgccgtggctgaccagctcatctgtcagcgccggagacgttgccagcgccgccgcttctgccagaacagtaatgttctccagcagacgttcaatctcttcacggataacgttcgggtaacgcagacgttccagaatggcaaactggatgttgcggatagcgtcgagtttttcgaatcgctcgccaggttccagtccttcagctaaagcgaccagcagattagtgataccagcagaagcgctgaggacaactaaacgcacgttggcatcagaaagcacaatatcagcgctgcggttcatggcgtcaaaatcagctacgctggtaccgccaaatttggagacaacaatttcagacataactacctcgtgtcaggggatccattttcagccttggcacaagggaagagcggaagacgggtgggcgcagagcgatacttcgctactattttcacccagaagtgctccaccacttgcgaaacgcccgactgcgaacgcttctggtgacaacccaggggattcagcccctgtagccgatgatgaacgtggccagccgttcaatcacctcggcgatgcaccccctcaggtgttatcacaggactggctcctccaacaccgttacttgggcaacgcgcctcttctggcctgcgctagcgcaggtagtacatttataaataaagggtgagcggggcggttgtcaacgatggggtcatgcggatttttcatccactcctggcggtcagtagttcagctaataaatgcttcactgcgctaagggtttacactcaacattacgctaacggcactaaaaccatcacatttttctgtgactggcgctacaatcttccaaagtcacaattctcaaaatcagaagagtattgctaatgaaaaacatcaatccaacgcagaccgctgcctggcaggcactacagaaacacttcgatgaaatgaaagacgttacgatcgccgatctttttgctaaagacggcgatcgtttttctaagttctccgcaaccttcgacgatcagatgctggtggattactccaaaaaccgcatcactgaagagacgctggcgaaattacaggatctggcgaaagagtgcgatctggcgggcgcgattaagagcatgttctctggcgagaagatcaaccgcactgaaaaccgcgccgtgctgcacgtagcgctgcgtaaccgtagcaataccccgattttggttgatggcaaagacgtaatgccggaagtcaacgcggtgctggagaagatgaaaaccttcagtgaagcgattatttccggtgagtggaaaggttataccggcaaagcaatcactgacgtagtgaacatcgggatcggcggttctgacctcggcccatacatggtgaccgaagctctgcgtccgtacaaaaaccacctgaacatgcactttgtttctaacgtcgatgggactcacatcgcggaagtgctgaaaaaagtaaacccggaaaccacgctgttcttggtagcatctaaaaccttcaccactcaggaaactatgaccaacgcccatagcgcgcgtgactggttcctgaaagcggcaggtgatgaaaaacacgttgcaaaacactttgcggcgctttccaccaatgccaaagccgttggcgagtttggtattgatactgccaacatgttcgagttctgggactgggttggcggccgttactctttgtggagtgcgattggcctgagcattgttctctccatcggctttgataacttcgttgaactgctttccggcgcacacgcgatggacaagcatttctccaccacgcctgccgagaaaaacctgcctgtactgctggcgctgattggcatctggtacaacaatttctttggtgcggaaactgaagcgattctgccgtatgaccagtatatgcaccgtttcgcggcgtacttccagcagggcaatatggagtccaacggtaagtatgttgaccgtaacggtaacgttgtggattaccagactggcccgattatctggggtgaaccaggcactaacggtcagcacgcgttctaccagctgatccaccagggaaccaaaatggtaccgtgcgatttcatcgctccggctatcacccataacccgctctctgatcatcaccagaaactgctgtctaacttcttcgcccagaccgaagcgctggcgtttggtaaatcccgcgaagtggttgagcaggaatatcgtgatcagggtaaagatccggcaacgcttgactacgtggtgccgttcaaagtattcgaaggtaaccgcccgaccaactccatcctgctgcgtgaaatcactccgttcagcctgggtgcgttgattgcgctgtatgagcacaaaatctttactcagggcgtgatcctgaacatcttcaccttcgaccagtggggcgtggaactgggtaaacagctggcgaaccgtattctgccagagctgaaagatgataaagaaatcagcagccacgatagcagcaccaatggtctgattaaccgctataaagcgtggcgcggttaatcatcgtcgatatgtaggccggataaggcgttcacgccgcatccggcaaccgatgcctgatgcgacgcggtcgcgtcttatcaggcctacaggtcgatgccgatatgtacatcgtattcggcaattaatacatagcacgattgattaaataaccttaataacaatgccgacgttatgtcggcatttttttatcagataaatccccttgtctgtaatttaacggaaatcataccgtgaggttaatcctaaaatagatttttaatcgttgtttatttcggaaaatacgcagattaattgcttttgtttttattttaagtttatgatttttattgttatttaaatataagttgaaacttatatttgatattcattccaattatcctaaaacgccatcgctaattccccgcgccgtaattcgcatgctttagttgtgtatactcgatcccgcccgaaatgtttttgggtaaatctccattcattcaatgaagggaaattgttatgaaaaaagttctgtatggcatttttgccatatctgcgcttgcggcgacttctgcgtgggctgcacctgtacaggtgggcgaagcggcagggagcgcagcaacgagcgttagcgcggggagttcctccgcgaccagcgtcagcaccgtaagcagcgcggtgggtgtcgcgcttgcggcaaccggtggcggtgatggttctaataccgggaccaccacaaccacgaccaccagtacccagtaataaagtatgtatccccaaaataattcgagtcattgcatctgtggctagaagtatgaagggattaaccataaccacactccggtgtggttattctgcccctctggagaagagtcgtgaagcgacctgcactcattcttatctgcctgttattacaggcctgtagtgccacgactaaagagctgggcaatagtctgtgggacagtctgttcggcacgccaggcgtacagctgacggatgatgatattcaaaatatgccctacgccagccagtacatgcagcttaatggcgggccgcagttatttgtggtgctggccttcgctgaagacggacaacaaaaatgggtcactcaggatcaggctactctcgttacccaacatggccgtctggtgaagactctgctcggcggcgacaacctgattgaagtgaataaccttgctgccgacccgctgattaaacccgcacaaatcgttgatggcgcaagctggacgcgcacgatgggctggaccgagtaccagcaggtacgctacgccaccgcacgcagtgtcttcaaatgggatggcaccgataccgtcaaagtcggcagcgatgaaaccccggttcgcgtgctggacgaagaagtctccaccgaccaggcgcgctggcataaccgctattggatcgacagcgaagggcaaattcgccagagcgaacagtatctcggcgcggattattttccggtgaaaaccactctcatcaaggcggcaaaacaatgattaaacaaactattgtcgcgttgcttttgagtgtgggagcgagtagcgtcttcgcggcaggaaccgtcaaggtgttcagcaatggcagcagtgaggccaaaacgctaacgggcgcagagcatttaatcgatctggtaggccaaccgcggctggcaaacagctggtggcccggtgcggtgattagcgaagagctggcaacggcggcagcattgcgtcagcagcaggcgttgctgacacggctggcagaacagggcgcagattccagcgccgacgatgccgctgcgattaacgccttacgccagcaaattcaggcgttgaaagtgacgggcaggcaaaaaatcaatcttgatcccgatatcgtccgcgttgccgaacgcggtaacccgccgttgcagggcaactacacgctgtgggtcggaccaccgccgtccacggtcacgttgttcgggcttatcagccgtcctggcaagcagccattcactccaggtcgcgacgtggcgagctatctctctgaccagagcctgctcagcggtgcggatcgcagctacgcgtgggtggtttacccggacggacgcacgcaaaaagcgccggtggcttactggaacaagcgtcacgtagagccgatgcccggcagcattatttatgttggcctcgcggactccgtctggagtgagacgcctgatgcccttaacgccgacattcttcagactctgacgcagcggatacctcaataatgaaaaaaagacatctgcttagcttactggcgctgggcattagcacagcttgctacggcgaaacatatcctgcgcccattggtccgagccagagcgatttcggtggcgtaggattattacaaacgcccaccgcgcgtatggcacgggaaggggagttgagtctgaactatcgcgataacgatcagtaccgttattacagtgctagtgtgcaactcttcccgtggctggaaacaacgctgcgctacaccgacgtgcgcacccggcagtacagcagcgtcgaagcgttctctggcgatcaaacgtataaagataaagccttcgatctcaaactgcgtttgtgggaagagagttactggctgccgcaagtggcggttggtgcgcgggatatcggcggtacggggctgtttgatgcggaatatcttgttgccagcaaagcctgggggccgttcgattttacgctcggcctgggctgggggtatttgggcaccagcggtaatgtgaaaaatccgctctgtagtgccagtgataaatattgctatcgcgataacagctacaaacaggcgggatctatcgacggtagccagatgttccacggtcctgccagtctgtttggcggcgtggaataccagacgccctggcaaccgctgcgcctgaaactggagtatgaaggcaataattatcagcaggattttgccgggaagctggagcaaaaaagtaagtttaacgtcggtgcgatttatcgcgttaccgattgggccgacgttaaccttagctatgaacgtggcaacacctttatgtttggcgttacgttgcgcaccaactttaacgatctgcgcccgtcttacaacgataacgcccgcccgcaatatcaaccgcagccgcaggatgccattttgcagcatagcgtggtggcgaatcagttaacgctgttgaaatacaatgccggacttgccgatccacagatccaggcgaaaggcgatacgctgtatgttaccggcgagcaggtgaaatatcgtgatagccgcgaagggatcatccgtgcgaatcggatcgtgatgaacgatctgccggatgggatcaaaacgatccgcattacggaaaatcgccttaacatgccgcaggtgacgacggaaaccgatgtcgccagcctgaaaaatcatctcgccggagagccgttgggccacgaaacgacgctggcgcaaaaacgcgtcgagccagtggttccgcagtccaccgagcagggctggtatatcgacaaaagtcgctttgatttccatatcgatccggtgctgaaccagagcgtcggtggcccggaaaacttttacatgtatcagctgggcgtgatgggaacggcagatttgtggctgacggaccatctgctgaccaccggcagcctgtttgcaaatcttgccaacaactacgacaagtttaactacactaatcctccgcaggacagccacttaccgcgcgtgcgtacccatgtgcgcgagtatgtgcagaacgatgtctatgtgaataacctgcaagccaactacttccagcatctgggcaacggcttctacggtcaggtctacggtggttatctcgaaaccatgtttggcggtgcgggggcagaagtgttgtatcgcccgctggacagcaactgggcgtttggtctggatgccaactacgttaaacagcgcgactggcgtagtgcaaaagatatgatgaaattcaccgactacagcgtgaaaaccggacatctgaccgcctactggacgccatctttcgctcaggatgtgttagttaaagccagcgtcgggcagtatctggcaggggataaaggcggcacgctggagatcgccaaacgctttgatagcggcgtggtggtgggtggctatgccacgatcactaatgttagcaaagaggagtacggcgaaggggacttcaccaaaggcgtgtatgtcagcgtaccgttggatctcttcagctctggcccgacacgcagccgtgcggcgattggctggacgccgctgacgcgtgacggtggtcagcaacttgggcgtaagttccagttgtatgacatgaccagcgaccgtagcgtcaatttccgctaagtcatgggaaaggtgccagttttcgcactcactggcaccttcattcttaatggcctgtcgagccatcaggaacgcagttcactcccggtttgcgatctggtgtgtaaaggcgaaaacattctgtcttcctgtccgtcgatatcggttgcaggtctggttgcctgagcgactgggccatcattgggctggagacattgctttgcggtaggtcggctttatcagcagtaccgagcggaccagcataagcaggaagaacagagactgataacatcaaagcagcaaaataaggcttcatttttaccacctttatcaggttacgtttcatttgttccagaggaacattgtcgatttttcgcgcattgctggtggctgggaatcacctgaatgggtgatttttgaattaccggctttggtgcggtttgtcttgccggatgcgccgccaggcgcggcttatccggcctacgggtaggtatatccggctttggtggaggcgcgctccaaatccaggttgaacaaaacatacacaaaaaatatagatctccgtcacatttttgcgttatacaggaagctcgccactgtgaaggaggtactgctatgacgagtctctctcgtccgcgcgtggagtttatctccaccattttgcagaccgtactcaatcttggcctgctgtgcctcggcctgattttggttgtcttcctcggcaaagaaacggtgcatctggctgatgtgctgttcgcgccagaacaaaccagcaaatatgagctggtagaaggactggtggtttactttctctatttcgaatttatcgcgctgattgtgaagtactttcagtccggttttcacttcccgctacgttactttgtctatattgggatcaccgccattgtgcgcttgatcatcgtcgatcataaaagcccactggatgtgttgatctacagcgctgcgatcctgttactggtgatcaccctgtggctgtgtaatagcaaacggctgaagcgggagtaaaaagtcagcacgccgaaatggcgcggcgtgctggacaggaagattacagcgtagcagtttgttgtgttttcttcgtttccggttcccagagcgcttccagctcctcaagggttttacctttggtttccgggacaaatttccacataaacagtgctgccagaacgcccatacaaccgtaaatccagtaggagaaaccgttgtggaaatgggccaccagccaggagtttttgtccatcatcgggaaggtccaggagacgaagtagttcgccagccactgggccgccaccgcgattgccagcgctttaccacgaatagcattcgggaagatttcgctcagcagtacccagcataccggaccccaggacatggcaaaggcggcaacatagaacagcatgctcagtagcgccacaatacccggtgcctgagtgtaaaacgcggtaccgaggctaaacataccgattgccattccgagtgcgccgataatttgcagtggcttacgaccaaatttatccaccgtcataattgccagaacggtgaaggtgaggttgataactccgacaataatggtctgcaacagcgcgatatccgtgctggcccccagcgttttgaacacttccggcgcgtagtacagcaccacattgatgccgacaaattgctggaagatggagagcattacgccgattacaatcacgcccacgccaaacatcagcagacgaccaccggttttgcggccatgatccagggagtgtttaatttcctgtactgcctgagttgcaagcgtgttgcccataattttgcgcaggataccttccgcctgttcttgcttgccgcggctcatcagccagcgaggactttctggcacggtatacagcagcattaagaacagcagtgcagggatacattcgctggcaaacatataacgccagccgtcagtattcagccagctggcatcaccggaacgggcaataaaatagtttacgcagtaaactaaaagttgcccgaaaataatcgcaaactggttaaaagagaccagtttcccgcgaatatgagctggagccagttccgcaatatacattgggctgagcatactggctaaaccaacgccaataccgccaataatgcgataaataacaaattccgggacataacctgccagataaacaggcacagtgttgtccgggtttatagaggtaaaaccaagttctggccaggcagaacctacaccagaaataaaaaacaggacagcagcaatcttaagactatcacgacgaccgaagcggttactgcaataaccaccgagggcaccgccgatgatgcaaccaatcagagcgctggccacgcaaaaccctaacagggagttggcagcggattcacttaagttttgtggagcaacaaagacggtattgagactctcaacagtaccggaaataacggcggtgtcgtagccaaataataaaccacctaatgtagcgactaaggtaatgctaaatatataactggaattatactgggtattcattcagacctgccttagaccattctgatcttttatcagtgcattgatgttggaattgtcaggcagttaaggcaattatcattttttacaatgcgtttacgtaatgtcttttctgtgatcttaattgtgataattatccaaaattgataaaaacaatactattgccgtgactcagagcacgaaagagaattatcgtaagtgggaaaacaaataacgtaaaaataataagctctatgatggaaatattaaccggcgaacgattcagattgcagacgaaagaaaaaaaggcgctccgtggagcgccgaataacagtcacaagttgggataacgtaagttgagggtgcagcggcataacattggcagaacaacatctttaacctttcacaccacctgccgtcaggccgttgaccagccagcgttgagccagcaagaagacgatggtgatcggtaatgcagacatcacggcagcggcggcaaagtcaccccacaggtagttttgcgggttgaggtattgctgcatccccacggccagggtgtagctgtttacgtcacgcagtaacaggctcgcgaccggaacttcagtaatggcagcgataaagctcaggatgaataccaccgccagaatcggtacactcagcggcaacaggacaaggcggaaggcctgccacggtgtcgcaccatccagcgcagcagcttcttccaggctactgtcgatggtttcgaaatagcctttgatggtccagacatgcagcgcaatcccacccagatacgcgaaaattacgccgccgtgagtattcaggccaatgaatggaatgtactcacccagacgatcaaacaacgcatacaacgcgaccagactaagtactgccgggaacatctggaaaatcagcattcctttcagcagcgtcgctttgcctggaaagcgcatacgggcgaaagcgtaggcgcaggtggtggagagcgccacaatgccaatcgcggaaatcccggcgacctttacgctgttccacagccacagcagtaccgggaatggcggtggcgtaatgcgaccatcagcctgttcaacgctaaaacctaacgccagtttccagtgatcccaggagatttgctccgggatcaggctgccggtcgcaaagtttccctgacgcaggctgatagcgacgaccatcagcagcgggaacataatcgctgcgataaaaagtagcagtagcaggtgagtaataaataaacgagctttttggcttttcggttggaccattgccatttttgttatctcccttaatcaaacttcattcgcgtggctttcaggttcactatcgccagcgcacccaccagcaggaagatcagcgtggcaattgctgccgccagaccgaagtcctgacccccgccgccttcaaaagcgatgcggtaggtgtagttaacaagcaggtcggtataaccggctggcgtggtcgtgccaagacgatccgggccgccgttggttaacagttgaatcagcacgaagttgttaaagttaaaggcgaagctggcgatcatcagcggcgtcagcggtttaatcagcagcggcagcgtaatcttaaagaagttctggaacggacctgcgccatccattgcactggcttcatacaaatcgtccggaatcgctttcagcaagcccatgcagaggatcatcatgtacggataacccagccaggtattgacgataattagcatcgtgcgggcggtggtcggatcgctgaaccaggcgggcttcacgccaaacagcgcgctcaacatcatgttgatttcaccgaagctctggttaaacaaccctttgaaaatcaagatactaatgaagcttggcaccgcgtagggcagaatcagcaggacgcgatagaccgctttgccgcgcaacgcttcccactgcaccagacacgccagaaccatgccgaccgccaccgttaaaaagacagtgatcaggctgaacaccacggtccagacgaaaatggcgaggaacggtttctgaatgccttcgtcggtaaagacgcgggtaaagtttttccagccggtggtcacggtgtaaccggggcttagcttttcatcaccccagttgccgtcggcggtaatggactggtaaaagccaatttggttattcggacgatatttcacgccgctctgattattcgtcaacgtgccgtcaccgtcgagtgtgtagagcggctgcgtgccagaaaactggcgcagggagctcatcatcactttgttgccatccggcagaatggcggtaatgtcactcagcgcctgacgattctgggtaatcacgcgcagattcgcgcgttcgccttcgggctgggcggtcgtttctttcagttgcagtttttgctcgccgccaaatttaaaagcgtcggagaggtaatttttgccggtttcgccgtcgctgagcgccagttgccactcatcgcccgccgggtaaagaccaaagttataggttttgcctgcttgccaggagcgatctaacaacacttcctgcgcacgttcaaaagtcagctggttagtgctgctgtagttggtgaaggcaatggcgatggtgcagaccagagggaagaggacgaataatcccattccagccattcccgggtaaacatagcgccaggcgtaggctttacgattggcgaaaatatacagccccgcactactcaatatcagcgtggtaatggcgaacaggtattccccttgtgcgtacattaaaacaacaaggtaacccaccagcaggccgagcagacctagcacactccatttcagcgcgtcgctttgccaccaatgtttctttttaatgacatccatggggttcttcctcattccaggacggataaggctttcacgccttatccgacaacaactgcctgatgcgacgctgacgcgtcttatcaggcctacatacgtttcggttttgtaggccggacaaggcgttcacgccgcatccggcatttcacagcattacttggtgatacgagtctgcgcgtctttcagggcttcatcgacagtctgacgaccgctggcggcgttgatcaccgcagtacgcacggcataccagaaagcggacatctgcgggatgttcggcatgatttcacctttctgggcgttttccatggtggcggcaatacgtggatctttcgccaactcttcctcgtaagacttcagcgctacggcacccagcggtttgtctttattaaccgcttccagaccttcatcagtcagcagatagttttcgaggaactctttcgccagctctttgttcggactggcggcgttaatacctgcgctcagcacgccaacgaacggtttggatggttgacccttgaaggtcggcagtaccgttacaccataattcactttgctggtgtcgatgttggaccatgcccacgggccgttgatggtcatcgctgtttcgcctttattaaaggcagcttctgcgatggagtaatcggtgtctgcattcatgtgtttgtttttaatcaggtcaaccaggaaggtcagacccgctttcgcgccagcgttatccacgcccacgtctttaatgtcgtacttgccgttttcatacttgaacgcataacccccgtcagcagcaatcagcggccaggtgaagtacggttcttgcaggttgaacatcagcgcgctcttacctttcgctttcagttctttatccagcgccgggatctcttcccaggtttttggcgggttcggcagcagatctttgttataaatcaggcttaacgcttcaacagcgatcgggtaagcaatcagcttgccgttgtaacgtacggcatcccaggtaaacggatacagcttgtcctggaacgctttgtccggggtgatttcagccaacaggccagattgagcgtagccaccaaagcggtcgtgtgcccagaagataatgtcagggccatcgccagttgccgcaacctgtgggaatttctcttccagtttatccggatgctcaacggtgactttaattccggtatctttctcgaatttcttaccgacttcagcgagaccgttatagcctttatcgccgttaatccagattaccagtttaccttcttcgattttggcgagagcgctggcggaaaacatcatcgtcgttaatgcggataatgcgaggatgcgtgcacctgtttttattttcataatctatggtccttgttggtgaagtgctcgtgaaaacacctaaacggactctagtttctttatacggcaacctctttccatcctccttgcccctacgccccaccgtcgctttgtgtgatctctgttacagaattggcggtaatgtggagatgcgcacataaaatcgccacgatttttgcaagcaacatcacgaaattccttacatgacctcggtttagttcacagaagccgtgttctcatcctcccgcttcctcccccataaaaaagccagggggtggaggatttaagccatctcctgatgacgcatagtcagcccatcatgaatgttgctgtcgatgacaggttgttacaaagggagaagggcatggcgagcgtacagctgcaaaatgtaacgaaagcctggggcgaggtcgtggtaagcaaagatatcaatctcgatatccatgaaggtgaattcgtggtgtttgtcggaccgtctggctgcggtaaaagcactttactgcgcatgattgccgggcttgagacgatcaccagcggcgacctgttcatcggtgagaaacggatgaatgacactccgccagcagaacgcggcgttggtatggtgtttcagtcttacgcgctctatccccacctgagtgtagcagaaaacatgagttttggcctgaaactggctggcgcaaaaaaagaggtgattaaccaacgcgttaaccaggtggcggaagtgctacaactggcgcatttgctggatcgcaaaccgaaagcgctctccggtggtcagcgtcagcgtgtggcgattggccgtacgctggtggccgagccaagcgtatttttgctcgatgaaccgctctccaacctcgatgctgcactgcgtgtgcaaatgcgtatcgaaatctcccgtctgcataaacgcctgggccgcacaatgatttacgtcacccacgatcaggtcgaagcgatgacgctggccgacaaaatcgtggtgctggacgccggtcgcgtggcgcaggttgggaaaccgctggagctgtaccactatccggcagaccgttttgtcgccggatttatcggtagcccaaagatgaacttcctgccggtaaaagtgaccgccaccgcaatcgatcaagtgcaggtggagctgccgatgccaaatcgtcagcaagtctggctgccagttgaaagccgtgatgtccaggttggagccaatatgagcctgggtattcgcccggaacatctactgccgagtgatatcgctgacgtcatccttgagggtgaagttcaggtcgtcgagcaactcggcaacgaaactcaaatccatatccagatcccttccattcgtcaaaacctggtgtaccgccagaacgacgtggtgttggtagaagaaggtgccacattcgctatcggcctgccgccagagcgttgccatctgttccgtgaggatggcactgcatgtcgtcgactgcataaggagccgggcgtttaagcaccccacaaaacacacaaagcctgtcacaggtgatgtgaaaaaagaaaagcaatgactcaggagatagaatgatgattactctgcgcaaacttcctctggcggttgccgtcgcagcgggcgtaatgtctgctcaggcaatggctgttgatttccacggctatgcacgttccggtattggttggacaggtagcggcggtgaacaacagtgtttccagactaccggtgctcaaagtaaataccgtcttggcaacgaatgtgaaacttatgctgaattaaaattgggtcaggaagtgtggaaagagggcgataagagcttctatttcgacactaacgtggcctattccgtcgcacaacagaatgactgggaagctaccgatccggccttccgtgaagcaaacgtgcagggtaaaaacctgatcgaatggctgccaggctccaccatctgggcaggtaagcgcttctaccaacgtcatgacgttcatatgatcgacttctactactgggatatttctggtcctggtgccggtctggaaaacatcgatgttggcttcggtaaactctctctggcagcaacccgctcctctgaagctggtggttcttcctctttcgccagcaacaatatttatgactataccaacgaaaccgcgaacgacgttttcgatgtgcgtttagcgcagatggaaatcaacccgggcggcacattagaactgggtgtcgactacggtcgtgccaacttgcgtgataactatcgtctggttgatggcgcaagcaaagacggctggttattcactgctgaacatactcagagtgtcctgaagggctttaacaagtttgttgttcagtacgctactgacagcatgaccagccagggtaaagggctgagccagggttctggcgttgcatttgataacgaaaaatttgcctacaatatcaacaacaacggtcacatgctgcgtatcctcgaccacggtgcgatctccatgggcgacaactgggacatgatgtacgtgggtatgtaccaggatatcaactgggataacgacaacggcaccaagtggtggaccgtcggtattcgcccgatgtacaagtggacgccaatcatgagcaccgtgatggaaatcggctacgacaacgtcgaatcccagcgcaccggcgacaagaacaatcagtacaaaattaccctcgcacaacaatggcaggctggcgacagcatctggagtcgcccggctattcgtgtcttcgcaacctacgccaagtgggatgagaaatggggttacgactacaccggtaacgctgataacaacgcgaacttcggcaaagccgttcctgctgatttcaacggcggcagcttcggtcgtggcgacagcgacgagtggaccttcggtgcccagatggaaatctggtggtaatagcaaaacctgggccggataaggcgtttacgccgcattcggcaaccaacgcctgatgcgacgcttgcgcgtcttatcaggcctacaacggctgtcaaatgtaggccggataaggcgtttacgccgcatccggcataaaaacaggttgtcattatctgaaaggggcgaaagcccctctgattatcgggtttagcgcgctattgcctggctaccgctgagctccagattttgaggtgaaaacaatgaaaatgaataaaagtctcatcgtcctctgtttaagtgcagggttactggcaagcgcgcctggaattagccttgccgatgttaactacgtaccgcaaaacaccagcgacgcgccagccattccatctgctgcgctgcaacaactcacctggacaccggtcgatcaatctaaaacccagaccacccaactggcgaccggcggccaacaactgaacgttcccggcatcagtggtccggttgctgcgtacagcgtcccggcaaacattggcgaactgaccctgacgctgaccagcgaagtgaacaaacaaaccagcgtttttgcgccgaacgtgctgattcttgatcagaacatgaccccaagtgccttcttccccagcagttatttcacctaccaggaaccaggcgtgatgagtgcagatcggctggaaggcgttatgcgcctgacaccggcgttggggcagcaaaaactttatgttctggtctttaccacggaaaaagatctccagcagacgacccaactgctcgacccggctaaagcctatgccaagggcgtcggtaacagcatcccggatatccccgatccggttgctcgtcataccaccgatggcttactgaaactgaaagtgaaaacgaactccagctccagcgtgttggtaggacctttatttggttcttccgctccagctccggttacggtaggtaacacggcggcaccagctgtggctgcacccgctccggcaccggtgaagaaaagcgagccgatgctcaacgacacggaaagttattttaataccgcgatcaaaaacgctgtcgcgaaaggtgatgttgataaggcgttaaaactgcttgatgaagctgaacgcctgggaagcacatctgcccgttccacctttatcagcagtgtaaaaggcaaggggtaattacgccccacagtgctgattttgcaacaactggtgcgtctcctggcgcacctttttttatgcttccttcctgggatatgagcgattttttatagtaactcacttcttcttcactaagaatatccattatctcaatgccttatcagagattcttttcctttcgccggtagtgtctggacattcaggctacttttccaggttattttatttctgttatgcagaggttttatgataagtcatatcctaaattctggcggcaataactctttgatgaaacatgatgtggtgcaaggaaataatatagtagatcttgatttactacgtaatttaaatggggtgccaggtttaaacagagataactttatttatatcagcaatattttttcaaatataaaacaacggaacgaaaaaatcatgcaataaatatgtttcgtgaagtctcaatcagtaatgatactataagtgtaaaattctacagaaatgaaaaaaattgaatgcgcttgcaattttctgatggataaagatgcgcaggggtatatcgacctgtctgatttggatttaacaagttgtcattttaaaggtgacgttataagcaaggtgtcttttttaagtagtaatctacaacatgtaacattcgaatgtaaagaaattggggattgcaattttactactgcaatagttgataatgtcatatttagatgtcgacgtttacacaatgtgatttttatcaaagcgagtggtgaatgtgtcgatttcagcaaaaatattcttgatacagttgacttcagccagagtcaacttggtcatagtaattttcgcgaatgtcagattagaaatagtaacttcgataattgttatctttacgctagccacttcaccagagcagagtttctgtctgccaaagaaataagttttattaaaagcaatttgacagctgttatgtttgattatgtgcgaatgagcacagggaattttaaagattgcattacagaacaattggaattaactattgattatagtgatatattttggaatgaagatctcgatggttatatcaataacattataaaaatgattgatacattgccagataatgcaatgatattgaaatccgttctggccgtaaaactggtgatgcaattaaaaatacttaatattgttaataaaaactttattgagaatatgaagaaaatatttagccattgtccttatataaaagatcccattatacgcagttatatccattctgatgaagataacaagttcgatgattttatgcgtcaacatcgattcagtgaggtgaatttcgatacccaacagatgatcgattttattaacagatttaatacgaataaatggctaattgataaaaataacaatttttttatccaacttatcgatcaggccttacgaagtacggatgatatgatcaaagcaaatgtttggcatctttataaagagtggattcgtagtgatgatgttagtcctatatttatagaaactgaagataatttaagaacctttaacacgaatgaattaacacgaaacgataatatctttatcctgttctccagtgtcgatgatgggccagttatggtggtaagctcccagcgcttacatgatatgttgaatcctacaaaagataccaattggaattccacgtatatctacaaatccagacatgagatgttgcctgttaatcttactcaggaaacacttttcagctccaaatctcatggtaaatatgcgcttttccccatttttactgcgagttggcgagctcatcgtataatgaataagggtgtttaagtaaaggaaaacatcaccgttcctggcatcctggacggtgatgcccctacggttgccctcgccagcacgggcatcggtaaagcgtaaggttcaacatcgttttaccacttcatgcgattgttgcgtttttgttgcgtattagatcacttaatttgctttacatctcccgtaaacacttttctgcgatacaatgcctttacgttatgtaacggagagttcggcatgagtcaccccgcgttaacgcaactgcgtgcgctgcgctattgtaaagagatccctgccctggatccgcaactgctcgactggctgttgctggaggattccatgacaaaacgttttgaacagcagggaaaaacggtaagcgtgacgatgatccgcgaagggtttgtcgagcagaatgaaatccccgaagaactgccgctgctgccgaaagagtctcgttactggttacgtgaaattttgttatgtgccgatggtgaaccgtggcttgccggtcgtaccgtcgttcctgtgagtacgttaagcgggccggagctggcgttacaaaaattgggtaaaacgccgttaggacgctatctgttcacaagtagcacattaacccgggactttattgagataggccgtgatgccgggctgtgggggcgacgttcccgcctgcgattaagcggtaaaccgctgttgctaacagaactgtttttaccggcgagtccgttgtactaagaggaaaaaaatatggagtggagtctgacgcagaataagctgctggcgtttcatcgcttaatgcgtacggataagccaattggcgcgttactgctgctctggccaacattatgggcgttgtgggtggcgacaccgggcgttccccagctctggatcctggcggtgtttgtcgcgggtgtctggctgatgcgcgctgccggatgtgtggtgaatgattatgctgaccgcaagtttgatggtcatgttaagcgcacggcgaaccgaccacttcccagcggcgcggtaacagagaaagaggcgcgcgcgctgtttgtcgtgctggtactgattagctttttactggtgctgacgctgaatacgatgaccattctgttgagcattgccgcgctagcgctggcgtgggtgtacccgtttatgaagcggtatacccatctaccgcaagtggtgctgggcgcggcgtttggctggagcattccaatggcttttgccgctgtgagtgagagcgtgccattgagttgctggttaatgttcctcgccaatattctctgggcggtggcttacgacacgcagtatgcgatggttgaccgcgatgatgatgtgaagattggcattaaatccacggcaatcctgttcggccaatacgataaattgattattggtattttgcagattggcgtactggcactgatggcgatcatcggtgagttaaatggcttaggctggggatattactggagtattctggtggctggcgcgctgtttgtttatcaacaaaaactgattgccaaccgcgagcgtgaagcctgctttaaagcatttatgaataataactatgttggtctggtactatttttagggctggcaatgagttactggcatttctgatgatgtaaaaaagccggatgatcatccggctttcttctgggttgcctgatgcgcggcgcttctcaggcctacacaacacatcgcaatttattgaatttgcagattatggaaggccggataaggcgttttcgccgcatccggcaattctctctgattacccttcgccctgcgtcgcactctcaatcgtcaaacgcacgtcacttgtaatcaactccgccagcaactgataaaccttcatcgtttctgccggttcggcatcgccgctatcgctgatatacccttcatcacgcagtgtcagcaccagagaactgaacaccgccttgtcgaagaactccggcgcgttgatgccgtgcagcacggagagacgttgcgcgacggtgcggctctctttctccagcgtaccgcggttgatgctcgggttggcactcaacaaccagaaggtgatggcataacgttgcagcgtttcgcgcgcgcctgcggccagcagctgtagcgtgcgagaatgcgccgggttgatatgcaactcatcatcttgcagggtaatcagcccctgacgttgcatctcatttgccagcgcatcaataacgtccggcaactcgtcgcgatcccagcgcaggaacagctccgctttcagcattgggtaaagcacattgacgtgctccatcaatacgtcgcgggagatgtggcgatgctgggtgacgattgccgccatcaggctaggcagcaccaacatatgcgcaatgttgttgcgatagtaggtcatcagcaccgcttgctcgcgcggcagaatgatgatgtcgccgattgtgtctttctcgacttcaaacttgttcatttgcagcgcgtgatcgataagctcgctggcgctggcactaggaacggtagagtccgtggagtagggcacgttgcgcatcagatccaggtagcagttgagttgctcggttaactgctcgcgggtgagactgcgctgacgacttgccagtagcgcagtacagcacaggttcatggcgtttgccgcgcctgcgttgttaatgcgtaccatcagatcggcagcaatattattgaccgtcggcgttaaccatgccggacgcaccgcttcgatgggatcgatagattcacgccagtcaggtacatgctggttaaggtaggtcatcaacggcattggttcaccgaagttgacgtaaccctgaccgagattacgcagcttgcttaaaccgcgcagcatctgcggcaggctctctttctctttcgtcgcgccgcgcagttctttggcgtaagtacccacttccatgacgtgctcataaccgatatagatcggaatcagcgtaatcggacgcgtgccgccacgcagcatcgcctgaatggtcatgctcagcgtaccagttttcggatccagcaaacgccccgtacgggaacgaccgccttccacgaagtactcgacggaataaccacggctgaacagttcgccgagatactcccggaaaacggtggaataaagtttattgcctttaaacgtacggcgaataaagaacgcccccagacggcggaaaatcggcccggcaggccagaaattcaggttgatcccggcggcgatatgcggcggcaccagcccctggtgatacagcacgtaagaaagcagcaggtagtccatgtgactgcggtggcaaggcacatataccagctcatgaccgtcgtgggccagctggcgaacgcgctcagcgttatggacgttgatgccctggtaaagtcggttccaggtgaagcccagaatacggtcagtcaggcgaatcatctcgtaagagaaattcgccgcaatctcttccatcagtgcaatcgcgttctgctgcgctttttcatgggagatttttttgctgcgcgcttcatcttctaccgctttggcaatggcgcgggaggcgagcagcttattaaacagatcctgacgagcaggcaaacgtgggcctacggcagccagacgttgacgggcaaagtgcatacgcgccacgcgcgccagtttctgagcgatagttttatccgtgccgtgttcatccgccatacggcgcaggctaacactcgggctgaaacgcacaaaactgtcgcgaccgagccacagtacagcgaaaaatttctgtacgccgttaagcatacgcagcggcgggttcacttcgcctttttcacgccccggcgcgcgaccaaacatcacgctcactggcaccatctgcacatccagatttgggttgctacggtgcaaatcgagatagtcgtggaacagcttaatagactcttctttcggcgtgtaataggtgaacacacgcggcccgccgtgaatgaacacatagcgcggcagtagcgtgccgtcgatttccagcggctctaacgggtcaggcaagtcatgtgccagacactgggcgcgcaacgtcagcaaatctgctttgctgttgtacggtaaaacgtacataattggacgagaggtatccagccccagttccggggcaggatctgccggaatagacttgctttttaccaggatgcttaatggtaaattcagtaatttgtagtaaattcgtggccagccggacataaacgatgtaaagcctctggttaataatgcaaatgcgcggcaaggatagcagaaagtcatgggaaattctgtggtatccgctcatgtttcgcgcggcgctacgcaaacccgaatcatcggatttaacggtacactgatattgacgctcataatgtaaaaaggttctttcaatggccaataataccactggattcacccgaattatcaaagctgctggctattcctggaaaggtttacgcgctgcatggatcaacgaagcggcattccgtcaggaaggcgtagcggtattgttggcggtggtcatcgcctgctggctggatgtggacgcgattacccgcgtgctgcttatcagctccgtgatgctggtgatgattgtggaaatcctcaatagcgccatcgaagcagtggttgaccgaattggctctgaataccatgagctttccggacgcgcaaaagatatgggatccgctgcggtgctgattgccattatcgtcgccgtgattacctggtgcattctgttatggagccattttggataacccttccagaattcgataaatctctggtttattgtgcagtttatggttccaaaatcgccttttgctgtatatactcacagcataactgtatatacacccagggggcggaatgaaagcgttaacggccaggcaacaagaggtgtttgatctcatccgtgatcacatcagccagacaggtatgccgccgacgcgtgcggaaatcgcgcagcgtttggggttccgttccccaaacgcggctgaagaacatctgaaggcgctggcacgcaaaggcgttattgaaattgtttccggcgcaagtcgcgggattcgtctgttgcaggaagaggaagaagggttgccgctggtaggtcgtgtggctgccggtgaaccacttctggcgcaacagcatattgaaggtcattatcaggtcgatccttccttattcaagccgaatgctgatttcctgctgcgcgtcagcgggatgagcatgaaagatatcggcattatggatggtgacttgctggcagtgcataaaactcaggatgtacgtaacggtcaggtcgttgtcgcacgtattgatgacgaagttaccgttaagcgcctgaaaaaacagggcaataaagtcgaactgttgccagaaaatagcgagtttaaaccaattgtcgttgaccttcgtcagcagagcttcaccattgaagggctggcggttggggttattcgcaacggcgactggctgtaacatatctctgagaccgcgatgccgcctggcgtcgcggtttgttttagttctctcttcatcaggcttgtctgcatggcattcctcactagttctgataaagcactctggcatctcgccttacccatgattttctccaatatcaccgttccgttgctgggactggtcgatacggcggtaattggtcatcttgatagcccggtttatttgggcggcgtggcggttggtgcaacggcgaccagctttctctttatgctgttgctgtttttacgcatgagcaccaccgggctgactgcgcaggcttatggtgccaaaaatcctcaggcattagcccgtacgctggtgcaaccgttgctgttggcgttgggggctggggcgttaattgcgctgctgcgtacgccgattatcgatctggcgctgcatattgttggcggtagtgaggcagtcctggaacaggcgcggcgctttcttgaaatccgctggttaagcgcaccggcgagcctggcgaatctggtattactcggttggttactcggcgtgcaatatgcccgtgcgccagtaattttgttagtggtcggcaatatcctcaacattgtgctggatgtctggctggtgatggggctgcatatgaacgtgcagggcgcggcgctggcgacggttattgcggaatatgcaacattgctgattggtctgctaatggtgcgtaaaatcctcaaactacgcggaatttccggcgaaatgctgaaaactgcctggcgaggaaacttccgtcgcttgctggcgcttaaccgcgatatcatgctgcgtagcctgttgttgcaactctgtttcggcgcgatcaccgtacttggcgcgcgactggggagtgacattatcgctgttaacgcggttctgatgacgctactcacctttaccgcctatgcgctggatggttttgcctacgcggttgaagcgcactccggtcaggcatacggtgcgcgcgacggtagccagttgctggatgtctggcgggcagcgtgccgccagagcgggatcgtagcgttactgtttagcgtggtttatttgctggctggggaacacatcattgcgttactgacgagcttaacccagattcagcagctggctgaccgctatcttatctggcaggtgattttgccggtggttggcgtctggtgttatctgctggacggcatgtttataggcgcaacgcgtgccaccgaaatgcgtaacagtatggcggtggccgccgcaggttttgcgctgacgctccttacgctgccgtggctgggtaatcatgctttgtggctggcattaaccgtctttctggcgttgcgcgggctttctctggcggctatctggcggcgtcactggcgcaatggtacctggtttgccgcaacgtgacggttaaaaattctgaataaataatcctaagccaaattgctgactacacttaatctcacgttcagaagaaaagtgaacgtactctcattcacaacctaacgatgaggtcttgattatgaataaagatgaagccggcggtaactggaaacagtttaaaggtaaagtgaaagagcaatggggcaaactgaccgatgatgatatgacgatcattgaaggtaaacgtgatcaactggtcggtaaaatccaggaacgttatggttatcagaaagatcaggcagaaaaagaggtcgtggattgggaaacccgcaatgaatatcgctggtaattaatccctcctgcccgacgtgtacaaggatgtacgccctcttaacgcggtttctttttcacctgcacagagtgatcatgctggcactgttcaggatgacgacacgcttccacttctacacatgccgcacagagcccatgtgcttcaatcacattatgccgcagggcaaaccccatttttgccgccagcgtatgcataatgtcttccacgccttctgcacactcttctttcactgcgccgcagcgatcgcaaataaacatggcactcgtatgggtgggctgatcgaacagatgacagagcacataactgttggtggattccaccttatgcacaaaaccttgctcaagcagaaaatccagcgcgcgataaaccgttggcggcttggcttgcggttcagcttcgcgcagtaaatcaagcagatcataagcgctgatagcgccatcctgcagactcatcaggcgcaacacttccaggcgctgtggggtcaggcgcacattacgctgcgcgcagattttttcagcctgcgctaataactcctgcgttgtggtcttttccatcgggcacctcaaagtgggggttaagaatgtccttactttaccatgttccaggaaaaacaccgagaacccttattgttgccgtaatgttgattttctgctttgtaggtaaggtgttatgttgccttgtcgtaccattatcaacacgataataattaataattcatttttaaataaattgcttcaagttaactcgctatttatttaactgggtttaaacgcatacctgtagttcagaaattatgagcgatttttgatagtgaccagatggcaaaagaattataaggaggacacggtacgacaaaaaaggtagatgaatcatgttgaagataatacccggtgcaactggatactttaataaaacactcaatagtaatcaattcgataatgaagatgcaatcaaagataaattagataatagaggtagtatcaaaggtaaattaaataatatatatggtaaatctattgattatgcagcgctgcgtcatcgggatataattattgcaaaaatagatttgtttattcaacgaatcacgcataatttatggcatgcacgtaaaaaaatgtgtttttaattgtgcaaataaatgatctcaaaatgtgggtcaataagtatattgacgattgcactgatgaggatttaaacgatcgtgactttattgcaagtgttgttgaccgggctatttttcatttcgcgattaatagtatatgtaatcctggggataataaagatgcaatgcccattgaacaatgtacttttgatgtagaaactaagaatgaccttccctccacggttcagctattttatgaggaatctaaggataatgaacctttagcgaatatacattttcaagcaataggttctggttttttaacgtttgttaatgcctgccaggaacatgatgacaacagcttaaaattatttgctagcctgttaattagtcttagttattctagtgcctacgcagatttaagtgaaacagtgtatattaatgaaaataatgagagctacctgaaagctcagtttgaaaaattatctcaacgtgatatgaagaagtacctgggagagatgaagcgtctggctgatgggggagaaatgaattttgatggctatctggataagatgagtcatctggtgaatgaaggaacgctcgatcctgatattttaagcaaaatgcgagatgctgcaccacaattaattagcttcgcgaagagctttgacccaaccagtaaggaagagattaaaatacttacagacacttctaaattaatttatgatttgttcggggttaaaagcgagaaataatatgtgaagttcttcgatagtatggaaggcattatataaaaggacccaatatttattgggttcttttttctctatcaatactattagcagggagatatatcaccagagtttaatgtgtgattttttatttatcgtcgaacctggattgtttatcattggccttaacaaagttaacggctaataagattatttccatcacttcgtgagagcttcatgccttgagaggatctcaattttcttttgcaatgagacaggcgcttcctgttgttatggtatagtaccccgctattgagcctcctgaatagtgatgctgaataacataaccccatgatatatcgataaaataatctctacatttgaaaatgcacggtaattctgaaatgcaaaaaatcaaccaaaccagcgcaatgcctgaaaaaactgacgttcactggagtggtcggtttagcgttgcaccaatgctcgactggacggacagacattgccgctatttcttgcgtctgctttcccgcaatacgttgctgtataccgaaatggtgaccacaggggcgattattcacggtaaaggtgattatctggcgtacagtgaagaagaacatccggtagcgttgcaactgggcggtagcgatccggcggcgctggcgcagtgtgcaaagctggcagaagcgcgcggatatgatgagatcaacctgaatgtcggctgcccgtctgaccgggtgcagaacggcatgtttggtgcgtgtctgatgggtaatgcgcagctggttgccgactgcgtgaaagcgatgcgcgatgtggtgagcattccggtgacggtgaaaacgcgtattggcatcgacgaccaggacagctatgaatttctctgcgatttcatcaataccgtttccggcaaaggcgagtgtgagatgttcatcatccacgcacgtaaagcctggcttagcgggttaagcccgaaagaaaaccgtgaaatcccgccgctcgattatccgcgtgtgtatcaactgaagcgtgactttccgcatctgacaatgagcattaacggtggtatcaagagcctggaagaggccaaagcacacctgcaacatatggatggcgtgatggtcgggcgcgaggcgtatcagaatccgggtattctggcggcggtagaccgggagatctttggttccagcgataccgatgccgatccggtggcggtagtgcgcgccatgtatccgtacattgagcgtgaactcagccaggggacgtatctcggccatattacccggcatatgttgggcttgttccagggtattcctggcgcgcggcagtggcggcgttatttaagtgaaaatgcccataaagcgggtgcagacattaatgtgctggaacacgcgctcaaactggtggcggataagcgttaacttttcaccaaaaagtagtcaaattcaccacgccctgcgcaccgtcgcggggcgttttgctgttaaatcaatagattatttttggcatgattcttgtaatgccagcaagagatttcatatttgggagagcatcatgctggaactactttttgtgattggcttttttgtcatgctgatggtcaccggcgttagcttgctgggcattatcgccgcgctggttgtggcgacggccattatgttcctcggcggtatgctggcattgatgattaagttgctgccgtggttactactggcgattgcggtggtgtgggttattaaggcgattaaagcaccaaaagtgccgaaatatcagcgttatgaccgctggcgttactaagggattgtgcggatgatcacaacctaaggttttatccttagaacaaaataggaattaataatcaaatctgtcactattgcgcctctaacagattcatcgtgctgtaccctacatacagccgaactataaaaagaaagggcttcccaggtggaagccctatttcttttatggaatcagcaggctggaaccttgcgtcgcccggctttccagaatctcatgcgcacgctgcgcatccttcagcggatatttctgctgctcggcgacatcgaccttaatcacaccgctggcaatcaaagagaacagttcattactggcctcggttaattcctcccgcgtggtgatatagccttgcagggaagggcgtgtcacatacaagctgcctttttgattgagaatgcctaagttcacaccggtaaccgcaccactactgttgccaaaactgaccattaagccgcggcgttgcaggcaatccaggctccgttcccaggtgtctctgcccacggaatcgtacaccacgcgcactttcttaccgccggtgatctcttttaaccgctcgaccagatcctcttcacgatagttaataacctgccacgcgcccgcttttagcgcgctctgcgctttttgcgcggttcctacggtgccgataagtttcgcgcccagggcttttgcccactggcaggcaattaagccaacgccgccagccgctgcgtggaacaggaactgttcatcgggtttaatttcataggttttgcgcagcagataataaaccgttaagcctttcaggaaggatgccgcagcttgctcaaaagaaattgccgcaggcagaatcgccgctttatccgcaataatgttatgcacagagctgtaagcgcctaacgcgctctgcgcatagactacacgatcgcctgccttaatatgctttacaccactgccgactttactcacgatgcctgctgcttcggtgcctaatccgctgggtaggcttggcggcgggtaaaggccgctgcggatatatgtgtcgataaaattgatgccgatggctttattttcgacctggatttcattctccgccggatcggcaggagtgaactctacggcttgaagtacttccgggccaccgtgcttgtgaaattcaattcgtgttgccatgtgtcctccagaacgtatcgtcagggtctgcttcatatgataaagtttcgacccattctttatctcggtaactccattcactatggcaggaaataaacccttcaacaaacagcaggctgaaccccgcgaacgcgatccacaagttgccgggctgaaagtgcctccgcacagcatcgaagcggagcagagcgtgttgggcggtttaatgctagataacgaacgctgggatgatgtagccgagcgtgtggtagcagacgatttttacacccgcccacaccgtcatatctttactgaaatggcgcgtttgcaggaaagcggtagccctatcgatctgattactcttgcggaaagcctggaacgccaggggcaactcgatagcgtcggtggttttgcttatctggcagagctgagtaaaaatacgccaagtgcggctaacatcagtgcctatgcggacatcgtgcgtgaacgtgccgttgtccgtgagatgatcagcgttgcgaatgagattgccgaagctggttttgatccgcaggggcgtaccagcgaagatctgctggatctggctgaatcccgcgtctttaaaattgccgaaagtcgtgcgaacaaagacgaagggccgaagaacatcgccgatgtgctcgacacaaccgtggcgcgtattgagcagttgtttcagcagccacacgatggcgttaccggggtaaacaccggttatgacgatctcaacaaaaaaaccgctggcttgcagccgagcgatttgatcatcgtcgccgcgcgtccgagcatgggtaaaacaacatttgcgatgaacctcgtcgaaaacgcggcgatgttgcaggataaaccggtacttatcttcagcctggagatgccaagtgaacagatcatgatgcgttctctggcgagcctgagccgcgttgaccagactaaaatccgtaccgggcagctcgatgacgaagactgggcgcgcatttccggcaccatgggtattttgctcgaaaaacgcaatatctatatcgatgactcctccggcctgacgccaacggaagtgcgttcccgcgcacgccgtattgcccgtgaacacggcggcatcgggcttatcatgatcgactacctgcaactgatgcgcgtaccggcgctttccgataaccgtacgctggaaattgcagaaatctctcgcagcctgaaagcactggcgaaagaactgaacgtgccggtggtggcgctgtcccagttgaaccgttctctggaacaacgtgccgacaaacgcccggtcaactccgacctgcgtgaatctggctctatcgagcaggatgcggacttgatcatgtttatctatcgtgatgaggtgtatcacgaaaacagtgatttaaaaggcatcgcggaaattattatcggtaaacaacgtaacggcccaatcgggacggtacgcctgacctttaacggtcaatggagccgcttcgacaactatgcggggccgcagtacgacgacgaataataattattttatgaattaggtaattaaagcaaacacttatcaaggaacacaaatgcaagcggcaactgttgtgattaaccgccgcgctctgcgacacaacctgcaacgtcttcgtgaactggcccctgccagtaaaatggttgcggtggtgaaagcgaacgcttatggtcacggtcttcttgagaccgcgcgaacgctccccgatgctgacgcctttggcgtagcccgtctcgaagaagctctgcgactgcgtgcggggggaatcaccaaacctgtactgttactcgaaggcttttttgatgccagagatctgccgacgatttctgcgcaacattttcataccgccgtgcataacgaagaacagctggctgcgctggaagaggctagcctggacgagccggttaccgtctggatgaaactcgataccggtatgcaccgtctgggcgtaaggccggaacaggctgaggcgttttatcatcgcctgacccagtgcaaaaacgttcgtcagccggtgaatatcgtcagccattttgcgcgcgcggatgaaccaaaatgtggcgcaaccgagaaacaactcgctatctttaataccttttgcgaaggcaaacctggtcaacgttccattgccgcgagcggtggcattctgctgtggccacagagccattttgactgggtgcgcccgggcatcattctttatggcgtcagcccgctggaagatcgctccaccggtgccgattttggctgtcagccagtgatgagtctaacctccagcctgattgccgtgcgtgagcataaagccggagagcctgttggttatggtggaacctgggtaagcgaacgtgatacccgtcttggcgtagtcgcgatgggctatggcgatggttatccgcgcgccgcgccgtccggtacgccagtgctggtgaacggtcgcgaagtaccgattgtcgggcgcgtggcgatggatatgatctgcgtagacttaggtccacaggcgcaggacaaagccggggatccggtcattttatggggcgaaggtttgcccgtagaacgtatcgctgaaatgacgaaagtaagcgcttacgaacttattacgcgcctgactagtagggtcgcgatgaaatacgtggattaatcgttctgtaatatttgattgtctgtgccggatgcggcgtgaatgccttatccggccaataaaatcctaaaaattcaataagttgatgttctttcatgctcttataaaggtcgtgcctctggcggatgtacgtttgtcatgagtctcactctgttgctaattgccgttcgctcctgaacatccactcgatcttcgccttcttccggtttattgtgttttaaccacctgcccgtaaacctggagaaccatcgcgtgtttcaaaaagttgacgcctacgctggcgacccgattcttacgcttatggagcgttttaaagaagaccctcgcagcgacaaagtgaatttaagtatcggtctgtactacaacgaagacggaattattccacaactgcaagccgtggcggaggcggaagcgcgcctgaatgcgcagcctcatggcgctagcctttatttaccgatggaagggcttaactgctatcgccatgccattgcgccgctgctgtttggtgcggaccatccggtactgaaacaacagcgcgtagcaaccattcaaacccttggcggctccggggcattgaaagtgggcgcggatttcctgaaacgctacttcccggaaagtggcgtctgggtcagcgatcctacctgggaaaaccacgtagcaatattcgccggggctggattcgaagtgagtacttacccctggtatgacgaagcgactaacggcgtgcgctttaatgacctgttggcgacgctgaaaacattacctgcccgcagtattgtgttgctgcatccatgttgccacaacccaacgggtgccgatctcactaatgatcagtgggatgcggtgattgaaattctcaaagcccgcgagcttattccattcctcgatattgcctatcaaggatttggtgccggtatggaagaggatgcctacgctattcgcgccattgccagcgctggattacccgctctggtgagcaatagcttcagcaaaattttctccctttacggcgagcgcgtcggcggactttctgttatgtgtgaagatgccgaagccgctggccgcgtactggggcaattgaaagcaacagttcgccgcaactactccagcccgccgaattttggtgcgcaggtggtggctgcagtgctgaatgacgaggcattgaaagccagctggctggcggaagtagaagagatgcgtactcgcattctggcaatgcgtcaggaattggtgaaggtattaagcacagagatgccagaacgcaatttcgattatctgcttaatcagcgcggcatgttcagttataccggtttaagtgccgctcaggttgaccgactacgtgaagaatttggtgtctatctcatcgccagcggtcgcatgtgtgtcgccgggttaaatacggcaaatgtacaacgtgtggcaaaggcgtttgctgcggtgatgtaatgcaggaaagcaggctggagctacccagcctgcagtgaaattaaactgtcgtcgctttcactctttctttatagatgatttttttgatgccatcgttctacgtgagagataataaacgttgttagttcttttattgttaagcttatcccaattatctggaattccttatcctgtttttttgggtggagtaataatttctgcacatctaaccattattaaatttaataataagtatcgggtttgttacgatagaatatttctatatcctcaagaatatgctttgccttattgcctgtgactttctgagattcaattatagtatcgttaaattctaatgttaaagagaactcttttttccgctttgtgtaagtttaaccttatattgattaccaatatcaaataaaaaggtcctgtaatgagaataatcacctttaacctcctcggcaaaacagcaaagcgtgcaaatatacataaagtctttcttacccctgattttgttaactaaatcaataaatgcgtgaaaaactttacttgcaatagaacttgatacttcttctccaggtctaaaaaatcttttgcaatttttaactgtgtttctatgtataaaaagaaatctttggcataagagatatctttattatttagtgcatctagctcaacaggtaaagatgtcgttttgttgctattcacatatgatatattcatatcatcatctccatcgcgagtaataaaattaatcaccattgtagggtagggggctggtcaatcagaaatcatctttataaacttcgattgtttttgtaatgctgtatcattaagttcattaaatcgtacagcagataaatgttctatcaaatttcgctcatttgccgaggattcatcataataaacgtaaaattaatgtatccttacatcgagtaataaacattttttatacaaaaaaagacaggaacgtatttactgggttaaatataatcatcctgcttttcatcacaaaaaccgcagataatccttcctttccccggcagctggcgttatggtcagatggtttttgcaacaaatctcacaataaaaagtttcaacatactgactatttagggaaaaatatgcgcaagatcacacaggcaatcagtgccgtttgcttattgttcgctctaaacagttccgctgttgccctggccagttctcctagtccgcttaaccctgggactaacgttgccaggcttgctgaacaggcacccattcattgggttagcgtcgcacaaattgaaaatagcctcgcagggcgtccgccaatggcggtggggtttgatatcgatgacacggtacttttttccagtccgggcttctggcgcggcaaaaaaaccttcagcccagaaagcgaagattatctgaaaaatcctgtgttctgggaaaaaatgaacaatggctgggatgaattcagcattccaaaagaggtcgctcgccagctgattgatatgcatgtacgccgcggtgacgcgatcttctttgtgactggtcgtagcccgacgaaaacagaaacggttagtaaaacgctggcggataattttcatattcctgccaccaacatgaatccggtgatctttgcgggcgataaaccagggcaaaatacaaaaagccaatggctgcaggataaaaatatccgaattttttatggcgattctgataatgatattaccgccgcacgcgatgtcggcgctcgtggtatccgcattctgcgcgcctccaactctacctacaaacccttgccacaagcgggtgcgtttggtgaagaggtgatcgtcaatagtgaatactgacagagcgggagagcgtgatgctctcccgaatgctgtttttttaatcacacctttatcctttcgctgtcttgctgcaaactgattaagagagttttatcaaggagcagcacatgtggtatcaaaagacgctcacgcttagcgccaaatctcgtgggtttcatctggtaacggatgaaattctgaatcagctggctgatatgccgcgcgttaacatcggcttactgcatctgttgctgcaacatacctccgcctctctgacacttaatgagaactgcgatcccaccgtacgccacgacatggagcgttttttcctccgcaccgttcccgacaacggaaattatgagcatgactatgagggagcagacgatatgccttctcatatcaaatccagtatgctgggaacaagccttgtattgccggtgcataaagggcgtattcagaccggcacctggcaaggcatttggctgggggaacatcgcatccacggcggaagccgtcgcatcatcgcgacactacaaggggagtaaaaaatgaccattagcgagttgctacaatattgcatggcaaaaccaggcgcagaacagagcgtgcataatgactggaaagcgacgcagatcaaagtggaagatgtactgtttgcgatggtgaaagaagtagaaaatcgcccagctgttagcctgaaaaccagcccggagctggcggagctgctacgtcagcagcacagcgatgtgcgtccaagccgccatctgaataaagcgcactggagcaccgtgtatctcgacggtagcctgccagatagccaaatctattatctggtggatgcgtcttatcagcaggcggtgaatttactgccggaagaaaaacgtaaattgctggtgcaactctgaaaggaaaaggccgctcagaaagcggccttaacgattacagcatcggcttaaggaagcgtgccgtgtgacttgcttcgcactccgcgacggtttctggcgtaccggagacgaggatctcgccgccaccactgccgccttctggtcccaggtcgacaatccagtcagcggttttgatcacgtcgagattgtgctcaatcaccacaatggtgttgccctgatcgcgcagtttatgcagtacgtcgagcagttgctgaatatcggcgaagtgcagaccggtggtcggctcgtcgagaatatacagcgtctgcccggtgccgcgtttactcagttcacgcgccagcttcacgcgctgggcttcaccgccactaagggtggttgcggactgccccagtcgaatgtacgtcaggccaacgtccatcaacgtttgcagcttacgcgccagtgcaggtacggcatcaaagaactcacgcgcctcttcgatggtcatatccagcacttcgtggatggttttgcctttgtacttaatctccagcgtttcacggttatagcgtttacctttgcactggtcgcacggcacgtagatatccggcaggaagtgcatctccactttgatcacgccatcgccctgacaggcctcgcagcgtccgccacgaacgttaaagctgaaacgtcccggcgtatagccgcgcgcacgggattccggtacgcccgcaaacagttcgcgcacaggcgtaaacacgccggtataggtcgccgggttagaacgtggagtacgaccaattgggctttggtcgatatcgatcactttatcgaaatgctccagcccctgaatatcgcgatacggtgctggttcggcgatggtcgccccattcaactggcgttgggcaatcgggaacagtgtgtcgttaatcagcgtgcttttaccggaaccactaaccccggtgatgcaggtaaacagacccaccggcagcgtcagcgtcacgtccttcaggttgttgccgcgtgcgcctgtcagcttcagcactttttccggattcgccggaacgcgtttcttcggcacttcaatcttgcgtttgccgctcatgtactgcccggtcaagctctccggcaccgccataatcgcttccagcggaccttctgcgaccacttcaccgccgtgaacacctgcgcccgggccaatgtcgatcacatggtcagcggcgcgaattgcgtcttcgtcgtgctccaccacaatcacggtattaccgagatcgcgcagatggataagcgtacccaacaggcgctcgttatcacgctggtgcaggccgatagacggctcgtccagcacgtacataacgccaaccaggcccgcaccaatctggctcgccagacggatacgctgtgcttcaccgccagaaagcgtttctgcgctgcgggaaagcgtcaggtaattcaggccgacgttaacgaggaatttcagacgatcgccgatctctttaaggattttttctgcaatcttcgcccgctgacctgcgagtttgagattgttgaagaattccatcgcatgaccaatgctcatgtcggagatagcaggcagcggcgtattctcgacatacacgtggcgcgcttcccgacgcagacgcgtcccttcgcagctggcgcacggacgattactgataaacttggctaattcttcgcgtaccgcgctggattccgtctctttatagcggcgctccatattatgcagcacgccttcgaacggatgacgacgaatggaggtatcgccacgatcgttcatgtatttgaattcaatgttttctttgccagaaccgtacaacaccactttatgcacgttcgcgctcaggctgccccacggcgcttcgacgtcgaacttatagtgatctgccaggcttttcagcatctggaaataatagaagttgcggcgatcccagccacggatcgcaccaccagccaggctcagttccggattctggatcactcgatcaggatcgaaatattgctgtacgccaaggccgtcgcaggtcgggcaggcccccgccgggttgttaaagctaaacagtcgcggctccagttcacgcatactgtagccgcaaattgggcaggcgaagttggcggagaacagcagctcttccgctttcgggtcgtccatatccgccactaccgcggtaccaccggaaagctccagcgcggtttcaaaactctcggcaagacgttgggtaagatcgtcacgcaccttgaagcgatcaaccaccacttcaatggtatgtttcttttgcagttccagttttggcggatcggaaagatcgcagacttcgccatcaatacgagcacggatgtagccctggcttgccaggttctccagcgttttggtgtgttcgcctttgcgctctttaatgattggcgcgagtagcatcagacgcttgccttccggctggctcagcacgttatccaccatctggctgacggtttgcgccgccagcgggacgtcgtggtccggacagcgcggctcgccaacgcgggcgaataacaaacgcaaatagtcgtggatttcggtgattgtccccaccgtagaacgcgggttatgagacgtgcttttctgctcaatactgatggcaggagaaagcccctcaatatgatcgacgtccggcttttccatcagactcagaaactgccgcgcgtaggcggaaagggattcaacgtaacggcgctgcccttcggcatataaggtgtcgaaagcgaggctggatttgccagaaccgctaagcccggtcacgacaatgagcttgtcgcgggggataacgaggttgatgtttttgagattatgggtgcgggcgccccgaacttcgatcttatccattcacctttcccggattaaacgcttttttgcccggtggcatggtgctaccggcgatcacaaacggttaattatgacacaaattgacctgaatgaatatacagtattggaatgcattacccggagtgttgtgtaacaatgtctggccaggtttgtttcccggaaccgaggtcacaacatagtaaaagcgctattggtaatggtacaatcgcgcgtttacacttattcagaacgatttttttcaggagacacgaacatggccagcagaggcgtaaacaaggttattctcgttggtaatctgggtcaggacccggaagtacgctacatgccaaatggtggcgcagttgccaacattacgctggctacttccgaatcctggcgtgataaagcgaccggcgagatgaaagaacagactgaatggcaccgcgttgtgctgttcggcaaactggcagaagtggcgagcgaatatctgcgtaaaggttctcaggtttatatcgaaggtcagctgcgtacccgtaaatggaccgatcaatccggtcaggatcgctacaccacagaagtcgtggtgaacgttggcggcaccatgcagatgctgggtggtcgtcagggtggtggcgctccggcaggtggcaatatcggtggtggtcagccgcagggcggttggggtcagcctcagcagccgcagggtggcaatcagttcagcggcggcgcgcagtctcgcccgcagcagtccgctccggcagcgccgtctaacgagccgccgatggactttgatgatgacattccgttctgatttgtcattaaaacaataggttatattgttttaaggtggatgattaaagcatctgccagccataaaaaagaagcctccgttatggaggcttctacgtatcaggtcaaaatcattggccattgtggcggtgtctgattcatctcttctatcatcacgctctcgatgttgtgccagatagcggtgatgtccgccattgtgatgccaagcaaccccattgcgaaccaacaggcggaaacaacgcccagaccgctgctgatcaccgcaagcccgacataatcagaccgacgaaaacggatgttgagtgtgctggccagaaacatcattacggcactaagaagttgccagcgaagaagaaccacgccagtggtgagggtagccatcaaacaattcctctgaaaagagccgatgccctggacagcgcggcgttgttcacgggaggcgtggtacactctggctatcgcggggcttgcagaacacaaaaatgaaacactctgtttgtttcattaattttgtgaactatatcacaattgattgtttgttagccatattaggccgtgacttttattgctgtacagattatgtggtttttcagtggcattaagggcatatcttcccgccgcctctgcattcctgtaggaaattaattttgaatatcaatgaattattttcatccaggtgacgattagaaaggtatcaatttcaaatcaggcaaaagtgctatttataccgtaagatttatctaaagacgtcggtacccagggttttcaccttgcaatggccgggtataaacaggcaggaaattgatagcaatgagtcatcgtgcacgacaccaattactggcgttgccgggcattatctttttagttctctttcccatcattcttagcctatggattgccttcctttgggcaaaaagtgaagtgaataatcagctccgaacctttgctcaactggcactggataaatccgagctggtcattcgccaggcagatttagtgagcgatgcagctgaacgctatcaggggcaagtttgcactccagcccatcaaaagcgaatgttgaatattattcgtggctatctttatattaatgaattgatctatgcccgtgataaccattttttatgcagtagcctgatagcgcctgtaaacggctatacgattgcaccggccgattataagcgtgaacctaacgtttctatctattattaccgcgatacgccttttttctctggctataaaatgacctatatgcagcggggaaattatgtggcggttatcaaccctctcttctggagtgaagtgatgtctgatgacccgacattgcaatggggtgtgtatgatacggtgacgaaaacctttttcagcttaagcaaagaggccagcgcagcaacgttttctccgctgattcatttgaaggatttaaccgtacaaagaaatggctatttatatgcgacagtttatagcacaaaacgcccaattgcagccattgttgcgactagttatcaacgtcttataacccatttttataatcatcttatttttgcgttgcccgccggtattttggggagtcttgttctgctattactctggctacgtattcgacaaaactatttatctcccaaacgtaaattgcaacgcgccctcgaaaaacatcaactttgtctttattaccagccaataatcgatatcaaaacagaaaaatgtatcggcgctgaagcgttgttacgttggcctggtgagcaggggcaaataatgaatccggcagagtttattccgctggcagaaaaggaggggatgatagaacagataactgattatgttattgataatgtcttccgcgatctgggcgattacctggcaacacatgcagatcgctatgtttctattaacctgagcgcctccgattttcatacgagtcggttgatagcgcgaatcaatcagaaaacagagcaatacgcggtgcgtccgcagcaaattaaatttgaagtgactgagcatgcatttcttgatgttgacaaaatgacgccgattattctggctttccgccaggcaggttacgaagtggcaattgatgattttggtattggctactctaacttgcataaccttaaaagtttgaatgtcgatattttgaaaatcgacaaaagctttgttgaaacgctgaccacccacaaaaccagtcatttgattgcggaacacatcatcgagctggcgcacagcctggggttaaaaacgatcgctgaaggcgtcgaaactgaggagcaggttaactggctgcgcaaacgcggcgtgcgctattgccagggatggttctttgcgaaggcgatgccgccgcaggtgtttatgcaatggatggagcaattacccgcgcgggagttaacgcgcgggcaataaaattacaggcggtggcgataatcgctgggagtgcgatcaaactgccgacggaaaacgcgggagaaggtctgctggctgacataacccaggtccattgcgatatcaaaaatcggacgctcggtggtgcgcaactcaacggcggccagtaacaggcggcgttggcgaatgtaatcgccaagcgtctgatgcgtcaccgtgcggaacattcgttgcaagtaccacttactatagccacttttttttgcgactacatcaatgttaagcggctggtcaatatgctcgtcaatccatgcgataagatcctgaataattttctgatgggacataaatctgcctcttttcagtgttcagttcgttaattcatctgttggggagtataattcctcaagttaacttgaggtaaagcgatttatggaaaagaaattaccccgcattaaagcgctgctaacccccggcgaagtggcgaaacgcagcggtgtggcggtaagcgcgctgcatttctatgaaagtaaagggttgattaccagtatccgtaacagcggcaatcagcggcgatataaacgtgatgtgttgcgatatgttgcaattatcaaaattgctcagcgtattggcattccgctggcgaccattggtgaagcgtttggcgtgttgcccgaagggcatacgttaagtgcgaaagagtggaaacagcttagctcccaatggcgagaagagttggatcggcgcattcataccttagtggcgctgcgtgacgaactggacggatgtattggttgtggctgccttagccgcagtgattgcccgttgcgtaacccgggcgaccgcttaggagaagaaggtaccggcgcacgcttgctggaagatgaacaaaactaaagcgccacaagggcgctttagtttgttttccggtctttgtctttctctctatcccgctggtacacaggagggtttcccccgacgtcaacacacctcattcgagcacgtggtggaggttccggttggtgttgatgctttaattgtatgtcaccgacgtttcttcgccagtgtaaaagtatactttttaaccgcaatatttttgtcatctcagacgattttttatcgcaatcctgaacggtatacggctcgataacgctgcaatcttgcgcaccgacgataacgtttgcgcatcaattgcctggtttttcatcgtcaagacaataaaagagaaaaaagcagcaaacttcggttgaaaaagccgctatgatcgccggataatcgtttgctttttttaccacccgttttgtatgcgcggagctaaacgtttgcttttttgcgacgcagcaaattgtcgcaaacctggagcaggaagataacgtttcgctggcaggggattgtccgccacgcatcttgacgaaaattaaactctcaggggatgttttcttatgtctacgccaagtgcgcgtaccggcggtagtctcgacgcctggtttaaaattagtcaacgtggaagcactgtccgtcaggaagtggttgccgggttaacaacgtttctggcgatggtctacagcgtcatcgtcgttccaggtatgttgggtaaagcaggcttcccgcctgcggcagttttcgttgcaacctgtctggttgccggactcggttctatcgtgatgggtctgtgggctaatctgccgttggcgattggttgcgccatctccctgacagcgtttaccgcattcagcctggtgctggggcaacatattagcgtacctgtcgcgctgggtgccgtgttcctgatgggtgtgctgtttacggtaatttctgccacgggtatccgtagctggattttgcgcaacttgcctcacggtgtggcgcacggcacggggattggtatcggtctgttcctgctgctcattgccgctaacggtgtcggtctggtgattaaaaacccgcttgatggtctgcccgttgcgctgggtgatttcgcgaccttcccggtgattatgagtctggtaggtctggcggtgatcatcggcctggaaaaactgaaagtccctggtggcattctgctgaccattatcggtatcagtattgtcggtttgatcttcgatcctaacgtccatttctccggcgttttcgccatgcctagtttgagcgatgaaaacggcaatagtctgattggcagcctggacattatgggcgcgctgaatcctgtagtcctgccaagcgttctggcgctggtgatgacggcagtatttgatgccaccggaactatccgtgccgtcgccggccaggcgaacctgctggataaagatgggcagatcatcgacggtgggaaagcactgaccactgactccatgagcagcgttttctctggcctggtgggtgcggctccggcagcggtatacatcgagtctgcggcgggtacggcggcgggcggtaaaaccggtttgacggctatcaccgttggcgtgctgttcctcctgattctgttcctctctccgctctcttacctcgttccggggtatgcaacggctccggcgctgatgtacgttggcctgctgatgctgagcaacgtggcgaaaatcgactttgctgattttgttgatgcgatggcgggtctggttacggctgtattcatcgtgctgacctgtaacatcgtaacaggcatcatgatcggcttcgcgactctggtgattggtcgtctggtttccggcgaatggcgcaagttgaacatcggtacggtcgttatcgccgtggcgctggtgaccttctatgcgggtggctgggctatctaatctttcatcggattctgaaaacgggtggcaatggctgcccgtttttattttctccgcacattgtgtgagcttttgcgatattctgaaaaaaatgagaattcaggcataacgtctttctcagatcataaaaaacatcgcaaacagggaacgcatggaaatcttcttcaccatactgataatgaccctcgtggtcagcctgtccggggtggtcactcgtgtcatgccctttcagatcccgcttccgcttatgcaaatcgccatcggtgcgctactggcgtggccgacgtttggtttgcatgtggagtttgatcctgaactctttttagtcttgtttatcccgccgttgctgttcgctgatggctggaaaacgccgacccgtgaatttctcgaacatggtcgagagattttcggcctcgcgctggcgctggtggtggtcaccgtggtcggcattggcttccttatttactgggtggtgccgggcattccgctgatccctgcctttgcgctggcggcggtgctttctccgaccgatgctgtggcgctctccgggattgttggcgaagggcgcatcccgaaaaaaatcatgggcattttgcagggcgaagcgttgatgaatgacgcctccggtctggtgagcttgaagtttgccgtagcagtggcgatggggacgatgatcttcaccgtcggcggtgcgacggtcgaatttatgaaagtagccattggcggtattctcgccggttttgtggtgagctggctgtacggtcgcagcctgcgattcctcagccgctggggcggtgatgaacccgcgacgcagatcgtcctgctgttcctgctgccattcgcttcttatctgattgccgaacatattggcgtttccggcatcctcgctgcggttgccgccgggatgaccatcacccgctccggtgtgatgcgccgtgcgccgctggcaatgcgcctgcgtgcaaacagcacctgggcgatgctggaatttgtctttaacggcatggtgttcctgctgttaggtctgcagctgccgggtattctggagacgagcctgatggcagcagaaatcgaccctaacgtcgaaatctggatgctgtttaccaatattattctgatatatgcggcgctgatgctggtccgtttcggctggctgtggacgatgaaaaagttcagcaaccgcttcctgaagaagaagccgatggagtttggtagctggaccacacgagaaatcctgatcgcgtctttcgccggggtgcgtggggcgatcactctggccggtgtgctctctatcccgctgctcttgccggatggtaacgtcttcccggcgcgctatgagctggtgttcctggcggctggcgtcattctcttcagcctgtttgtcggcgtggtgatgttgcctattctgctacaacacattgaagtcgcggatcatagccaacaattgaaagaggaacgtattgcgcgagcggcaacggcagaagtggcgattgtggcgatccagaaaatggaggagcgtctggcggcggataccgaagagaatatcgataaccagctgcttacggaggtcagttctcgcgtcattggtaacctgcgtcgtcgcgccgatggacgtaacgacgttgaaagttccgtgcaggaagagaaccttgagcgtcgcttccgtctggcggcattgcgttctgaacgtgctgaactttaccacctgcgcgccacacgggagatcagcaacgaaacgctgcaaaaattactgcacgatctcgatttgcttgaagcgttgctaattgaggaaaatcagtaagccgaaagcgacgtaaccaggcccgaggtaatctgaaaaaggtgcaatcttttgcacctttaacaggttagctcgggctaacattcatgattctaaaacaaataaattatctctcttttaaagtcaattcattggctgttcttcgacttaacctcaatctgcatcttgcataatatctgcagtaatcttcatagcgactgcatgaagattatcctcagtttgactcatgccagtatgagtggcacaatcttcttcaaagaatttctgtagtgttaccaggatatcactattaatggagatattttcctcaccacggagaatggtaatacccattccctggacgctagcctcatcgaaattaacacgatagagacggatattaaacatccaggcttttgttaaaacagaacagttgaaatggcaattgcttaaattggcattattaaaattaacattagccatattagagtcggtacatataaccatttcgaggaacgtatttgttaaccgcgtaaaaaagagtttgctatcaattaagtttatattctggagggttgctttattcaggttgacacgagacagatcagcatgttcaaagttaattaaatcaagtttagagaagctaaggtcggctctaaataaattaatatatggcgctattactttataaagatttacctcagccatgtatgccatataaaaattactataatcaaggaaggtatttttaatattggctctattcattgttgcattgtagaattgaacatgcatagcggaacaactatttagagttccgtcagtcatttttatctgagcgaaattactgtcatcgagaatacaattatcaaaaagtattttttccattatggcgaaattaaaattcgttttatacatattacagtcctgaaaaatagcgttttgtagtctgcaacctgcaaaattgctattggataaatcttcatctttaatcacgatacctttcaggctaaggtgactaaaatcgtaaccaccatttactgtctgtgggatttcgatagtattattatggacggtgacattatttataaaatataccaccttaatactcacttccttatctttattaaggtaaactcttctcgtaattctatcgtcacatttattatttgcatgactagctatatctataaaatatttatgtattttcctgtccgtttctttcgtgatttttccacttggtaaactatcataaattcttttcattttctgaatcaagcctatcactttttcatgatcatccattttgaaaagagagagggctttattgtcaattaacgtgtttttatgatgtttgctgtaattatcactttttgttttctttgtatgacttggacttgtgacagagtggttatcgttaatcaggcaaagagggaaaaacatattatttaaaccattatagcgcataaaatatccttataattaacaagaaagaaaaggcatattctctgcattatcattttctacgactgtcaaaaatcgctcattttttaatgagtttatttgtttaatattatgggaaaaggtgatgcatttgggagaggaagagtattccccggtcagacgaccggggaaggggagagattaatgcgcgcggccttgctcaacgccaaagccggtctgggagcggataaactgcgcgcggaacagttcacgctcacgcgcgccttccgcactgttatcggttgcgctgaagaaccagatgccgaggaatgccacggtgatagagaacagcgccgggtattcatacgggaagatggctttttcgtgaccaaggatctgtacccaaatcgtcgggccgaggatcatcagtactactgcggtaatcagccccagccagccacccatcatcgcgccacgcgtggtcagtttgctccagtacatagaaagcagaatgatcgggaagttacagctcgccgcgatggcaaacgccagccccaccataaaggcgatgttctgattctcaaacagcacgccgaggataatcgcaatcacgccgaggatcagtacggtgattttacttacccgcagctcttcacgttcggtcgcgccttttttgaagacgttagcgtacaagtcatggctaaccgcggatgcgcccgccagcgtcagacccgcaaccaccgcgaggatagtggcgaaagcaaccgcactaataaaaccgaggaacaggttgccgcccactgcattcgccaggtgaacggccgccatgttgttaccaccaatcagatggcccgccgcgtctttatattccggattcgcaccaaccagcatgatcgcgccgaagccgataataaaggtcagaatatagaagtagcccataaacccggtggcgtagaacacgctcttacgtgcttcgcgggcatcgctgactgtaaagaagcgcatcagaatgtgcggcaagcccgccgtaccaaacatcagtcccagacccagagagagcgcggagatcggatctttcaccagcccgcccggcttcatgatgtcgacacctttcgggtgtaccgccatcgcttcactgaacagattgttgaagctaaagccgacgtgtttcatcaccataaaggccataaagctggcaccgaacagcaacagcacggctttgataatttgcacccaggtggtcgccagcatgccgccgaacaggacgtacatcatcatcagcacgccgaccagcaccaccgcaatgtgatagttaaggccaaacagcagctcgatcagtttacctgcgcccaccatctgggcgataaggtaaagcgccaccaccaccagagaaccacaggcgctaagaatacgaatcggcccttgtttcagacggtaagaggccacatcggcaaaggtgtagcgccccaggttacgcagacgttcggcaatcaggaacaaaatgatcggccagcccaccaggaagcccaggctgtaaattaagccgtcatagccggaggtaaacaccagcgcggagatccccaagaaactggcggcggacatatagtccccggcaatcgccagcccgttctggaagccagtgatattgccgcctgcggtgtagtagtcgctacgagaacgtacgcgtttacttgcccagtaggtaatgccgagcgtaaacacgacgaaaatcaggaacataataatcgcctgccagttcgttggctggcgctctacggccccgctaatagcatccgcggcgttagctgcgaaagggagtgtggcggcaagcgccgtcagaactcttttcatgatgcttgtacctcatgcagttatttcaacttgcttgtacctcatgcaggacttcattattaagacggtcgaattcgccgttcgcccgccagatgtagataccggtgagaacaaaggagatcacaatcactccaacaccaattggaataccgcgtgtgacgctggtgttcggattcagcggcgtgcccagccagccgggcgcgaaggcgatcagtaaaataaagccgatataaactgccagcataataatgctcaggatggtggcaaaccgttgccgtttttcgactaactccctgaaatgcgcattgtcttctatccgctgataaatagtgccattcatcacagattctccagaggtaatgtagggattgttttaattcccgctcccttatgggagaaggttaacgctcgggtaacccttgccgaatgtaggccggataaggcgtttacgccgcatccggcaatcaatgcctgatgcgacgctgtcgcgtcttatcaggcctacaaaccgttaccgactcgcatcgggcaattgtgggttagcttggcatcgcgatagcctgcttctcttcaagcagcttctcgactacgccaggatcggcaagcgtgctggtatcgcccaggttgctggtatcgcccgccgcaattttgcgcagaatacggcgcataattttgccggagcgggttttaggcagggagtcggtccagtgcagcacgtctggcgtcgccagcgggccaatctctttacgcacccagttgcggacttctgcgtacagttctggactcggttcctccccgtgattaagcgtgacgtaggcgtagatcgcctgacctttaatattgtgcggaatacctactacggcggcttcggcaatcttcggatgcgccaccagcgcgctctcaatctctgccgtccccagacggtgaccggagacgttcagcacgtcgtccacacgcccggttatccagtaatagccatcttcatcgcgacgcgcgccgtcgccgctgaaatacatatttttgaaggtggagaagtaggtctgttcaaaacgttcgtgatcgccaaacagcgtacgcgcctgacccggccaggagtcggtgattaccaggctaccttcggtggccccctccagcgggttaccttcgttatcgaccagcgccggttgcacgccgaagaacggacgtgttgcgctaccggctttcagctcggtagcgccaggcagcggggtgatcatgaaaccgccggtttcggtctgccaccaggtatcgaccaccggacatttctcgttgccgatttttttccagtaccactcccacgcttccgggttaattggctcgcccacggaaccgagaatgcgcaggctgctacggtcggtgccttcgatcgctttatcgccttccgccatcagcgcgcggatcgccgtgggtgcggtatagagaatattgacctgatgcttgtccaccacctgcgccatacgggcaggcgtcggccagttgggtacgccttcaaacatcagcgtggtcgcaccgcaggccagcgggccgtacagcaagtaactgtgtccggtcacccagcccacatcggcggtgcaccagtagatatcacccggatgataatcaaagacatatttaaaggtcagcgccgcgtacaccagataaccgccggtagtatgcagcacaccttttggcttaccggtagaaccggaggtgtagagaataaacagcggatcttcggcgttcatctcttccgcctggtgctgatcgctcgcttgctcaaccaggtcgtgccaccacaggtcgcgcccttcctgccagtcaattttcccgccagtacgcttcagtaccaccacatgctctacgctggtgacgttcgggtttttcagcgcgtcatcaacgtttttcttcagcggaatactgcgcccggcacgcacaccttcgtcggaagtgatcaccagtcgactgttggaatcaataatgcgcccggcaacggcttccgggctgaagccgccgaaaatcacgctatgcaccgcgccaatgcgggcgcaggccagcatcgcaaccgcggcttccggcaccatcggcatataaatcgccaccacatcaccttttttaatgcccagctcgagcagggtattggcgaagcggcagacgtcgcggtgcagctctttatagctgatatgtttgctctggctggcgtcgtcgccttcccagatgatggcggtacgatcgccgttttcttgcagatggcggtcaaggcagtttgccgccagattcagcgtgccgtcctcgtaccatttaatggacacattaccgggggcaaaggaggtgtttttcaccttctggtaaggtttgatccagtcaagaatttttccctgttcgccccagaaggtatcaggtacgttaatagattgttgatacatcgcctcgtactgctgagggtttatcaggcaacggtctgcgatgttggcaggaatggtgtgtttgtgaatttggctcatgcttttgttctccttgtaggatgttaataatatgtggcataagcgttaaatgtaggggtattggcagttttgtttagtatttgggcgacagatcacgcaaaagtagaattgtgcaaataaacggcagggtaatttttgaaggtcagcaacaaaagttgattaattctttgaggaacatgcagttatgcatgctgttgaaaaagaggaagatactgactaactctaaagtggtattttacatgcacttacaattgattaaagacaacattcacagtgtggttatttgttacacataggggcgagcaatgtcatgacagtgtaggtgcggttactgtcgtgaaaaacaataaaaaccgccattgcaacaatggcgcaattcggatgaagcccctatgacaaggataaaaataaacgcacgccgtatcttcagcttattgattccttttttctttttcacttctgttcacgctgaacaaacggctgctcccgcaaaacctgtaactgtggaagcgaagaatgaaacctttgccccgcagcatcccgatcaatatctctcctggaaagccaccagcgaacagagtgagcgtgttgacgccctggcggaagatccacggctggtgatcctgtgggcggggtatcccttcagccgcgattacaacaagccgcgtggacatgcttttgctgtgaccgatgtgcgtgaaaccctgcgtaccggtgcgccgaaaaacgctgaagatggtccgctaccgatggcatgctggagttgtaaaagcccggatgtggcgcgtctgatccagaaagacggcgaagatggctacttccacggtaaatgggcgcgcggcggtccggaaatcgtcaacaacttaggttgtgccgattgccataacaccgcctctccagagttcgccaaaggcaaaccgaagttaaccctttcccgtccgtatgcggctcgcgcgatggaagccattggtaaaccttttgagaaagccggacgtttcgaccagcaaagcatggtttgcggtcagtgccatgtggagtattacttcgacggcaaaaacaaagcggttaaattcccgtgggatgacggcatgaaagtcgaaaatatggagcagtattacgacaaaattgccttctctgactggactaactccctgagcaaaacgccaatgctgaaagcgcagcacccggaatatgaaacctggacagcgggcattcacggtaaaaacaacgtgacctgtatcgactgccatatgccaaaagtgcagaacgccgaaggcaaactctacaccgaccataaaattggtaatccgtttgataacttcgcccagacttgtgcgaactgccatacccaggacaaagctgccttgcaaaaagtggtcgcggaacgtaagcagagcattaacgacctgaaaatcaaggttgaagatcaactggttcacgctcacttcgaagcgaaagcagcgctggatgcaggcgcgacggaagctgaaatgaagccaattcaggacgatatccgtcatgcccagtggcgctgggatctggcgatcgcttcccacggcattcatatgcacgcaccggaagaaggtttacggatgctcggtacggcgatggataaagcggcggatgcacgcaccaaactggcgcgcctgctggcgaccaaaggcatcacccatgaaatccagatcccggatatcagtaccaaagagaaagcccagcaggccattggcctgaacatggaacaaatcaaggccgagaagcaggacttcatcaaaacggtgatcccgcagtgggaagaacaggcacgtaaaaacggtctgttaagccaataaccccgttccgcctcgcaaggggcggaaaacacaatggagtgaatatgagcgtattacgtagcttattaactgccggggtgctggcgagcggcctgttgtggagcctgaacggaattaccgctacccctgcggcgcaggcatctgatgatcgctacgaagttacccagcagcgtaacccggatgccgcctgtctggactgtcataaaccagataccgaaggtatgcatggaaaacatgcttccgttatcaacccgaataacaaactgccggtcacctgcaccaactgtcacggccagccaagtccgcaacaccgcgaaggggtgaaagatgtgatgcgctttaacgagccgatgtacaaggttggagagcagaacagcgtctgtatgtcctgtcatctgccggaacagttgcaaaaagcgttctggccgcacgatgtccacgtaaccaaagtggcgtgcgccagctgccattccctgcatccacagcaagatacgatgcagacgttaagtgacaaaggacggattaagatttgcgtcgattaccacagcgatcagcgcaccaatccgaactttaacccggcgtctgttccgttgcttaaggagcagccatgacctggtctcgtcgccagtttctcaccggcgtcggcgtgctggcagccgtcagcggcaccgcagggcgcgtggtggcgaaaacgttgaatatcaatggggtgcgttacggcatggtgcatgacgagagcttatgcatcggctgtaccgcctgtatggatgcttgtcgggaagtgaacaaggtgccggaaggcgtcagccgcctgacgattattcgtagcgagccgcagggcgaatttcctgatgtgaaatatcgcttcttccgtaagtcttgccagcactgcgatcatgcgccgtgcgttgacgtctgcccgaccggtgcgtcttttcgcgatgctgccagtgggattgtcgatgttaatccggatctctgcgtcggttgtcagtactgcatcgccgcctgtccgtaccgcgtgcgctttatccatccggtcacgaagacggcggacaaatgcgatttctgccgtaagaccaatttgcaggccggtaagttgcccgcgtgcgttgaagcttgcccgaccaaggcgctgacgtttggcaatctggacgatcccaacagtgagattagccaactgctgcgccagaagcccacttaccgctacaagctggcgctgggaaccaaaccgaagctgtaccgcgtaccgtttaaatacggggaggtgagccaatgacgcagacttccgcatttcattttgaaagcctggtgtgggactggccgattgccatctacctgtttttgattggtatttctgctggtctggtgacgctggccgtgctgttacgtcgcttctacccgcaggcgggcggtgcagacagtacgttgctgcgcaccacgctgattgtcgggccgggcgcggtgatcctcggtctgttgatcctcgtcttccacctgacaagaccgtggaccttctggaagctgatgttccactacagttttaccagcgtgatgagcatgggggtgatgctgtttcagctctacatggtggtgctggtgctgtggctggcgaaaatctttgaacatgatttgcttgccctgcaacaacgctggttgccgaagctggggatcgtgcaaaaggttctgagcctgctgacgcccgttcatcgcggactggaaacattgatgctggtgctggcggtgttgttgggggcttataccggctttctgctgagcgcgctgaaaagctatccgttcctcaataacccgatcctgccggtgctgttcctcttctccggcatcagctccggtgcggcggtggcgctgatcgccatggcgatacgccaacgcagtaacccgcattccacggaagcgcagtttgtacaccgtatggaaatccctgtggtatggggtgaaatcttcctgctggtggcgttttttgtcggtctggcgctgggcgatgacggtaaagttcgtgcgctggtggcggcattaggtggcggtttctggacgtggtggttctggcttggtgtcgccgggctggggctgattgtgccaatgctgctcaaaccgtgggtcaatcgcagttccggcattcctgccgtgctggcggcgtgtggggccagtctggtcggcgtgttgatgctgcgctttttcattctctacgccggacagttgacggtggcgtaagccagaaaagaggtggtttctggacgtattccttcctgaagtcggttttctggcgttgttgttaagtctcggggtcaacgtgttgaccccgttgacggccttcgcgggagtgcggttgcgctggcctgccatgatgcgactcacttgcatcggcattctggcgcagttcgcgctcctgctgctcgcctttggcgtactgacgtattgttttctcatcagcgatttcagcgtcatttatgtcgcgcaacatagctatagcctgctgagctgggaactcaagctggcagcggtgtggggcggccatgaaggtagcctgctgctttgggtgctgctgctttccgcctggagcgcgctgtttgcctggcattatcggcagcaaaccgatccgctatttccgctgacgttagccgttttatctctcatgctcgccgcactgctactgtttgtggtgctgtggtccgatcccttcgtgcggatatttccaccagcaatcgaaggccgcgatctcaatccgatgctgcaacatcccggtcttatctttcatccaccgctgctttaccttggctatggcggtttgatggtagcggcgagcgtggcgctggcgagtctactgcgcggcgagtttgatggtgcctgcgcccgaatttgctggcgctgggcgttacctggctggagtgcattaacggcggggatcatcctcggttcctggtgggcctactgcgaactcggctggggcggctggtggttctgggatccggtggaaaacgcctctttattaccctggctttctgccactgcgctgctgcacagtttgtccctgacacgccagcgggggattttttgccactggagcctgttgctggcgatagttactctgatgctgagcctgctgggcaccttaattgtccgttctggcattctggttagcgttcatgcgttcgcgctggataacgtccgcgccgtgccgttgttcagcctgtttgcactgattagccttgcgtctctggctctgtatggctggcgagcgcgggacggtggcccggcggtgcattttagcgggttaagccgggaaatgttaatcctcgctacgctgttgctgttttgcgcagtgctactgatcgtgctggtgggaacgctttatccgatgatttacggcctgctgggctggggacgcctctccgttggcgcgccgtattttaaccgcgcgacgttaccgtttggtctgttgatgctggtggtgattgtgctggcgacgtttgtctctggcaaacgcgtgcagcttccggcgctggtagctcatgcgggcgtgctgttatttgccgctggggtcgtggtctccagcgtcagccgtcaggagatcagcctgaatttacagccgggtcagcaggtgacgctggcaggatacaccttccgttttgagtgcctcgatctacaagccaaaggcaattacaccagcgaaaaagcgatagtggcactgtttgaccatcagcaacgcattggtgaactgacgccggagcggcgtttttatgaagcacgccgtcaacaaatgatggaaccgagtattcgctggaacggcatccatgactggtatgcggtcatgggggagaaaactgggccggatcgttacgcttttcgtttgtatgtacaaagcggtgtgcgctggatctgggggggaggattgttgatgattgcgggcgcattgttaagcggatggcgggggaagaagcgcgatgaataaagggcttctcacgctactgctgttatttacctgttttgcgcacgctcaggtcgtagacacctggcaattcgccaatccgcaacaacagcaacaggcgttaaatattgccagccagttacgttgtccgcagtgccagaatcaaaacttactggaatccaacgcgccggtggctgtcagtatgcgccatcaggtttacagcatggtggcggaggggaagaacgaagtcgaaatcattggctggatgaccgaacgctacggagattttgttcgctataacccaccgttaacgggtcagacgctggtgttatgggcgctgccagtggtgttgttactgctgatggcactgatcctctggcgagtgagggcgaagcgatgaaacagcccaaaataccggtgaaaatgctgacaacactcacgatattgatggtatttctctgtgtcggcagttatctgttaagcccaaaatggcaggcggtacgtgcggagtatcagcgtcagcgcgatccgctacatcagtttgccagccagcaaaccccggaagcgcagcttcaggcattgcaggataaaatccgcgctaatccacaaaacagcgaacagtgggcgttactgggcgagtactatctgtggcaaaacgattacagcaatagcttgctggcgtaccgtcaggcgttgcaactacgtggtgagaacgctgaactgtatgcggcgctggcgacggtgctttattaccaggccagccagcatatgaccgcccagactcgcgcaatgatcgacaaggccctcgcgctggacagtaatgaaatcaccgccctgatgctgctggcttccgatgcgtttatgcaggcgaactacgcgcaagccatcgaactatggcaaaaagtgatggatctcaacagtccgcgagttaaccgaacacagctggttgagagcattaatatggcgaaattgttgcagcggagattggattaatcatctggtgatgaagattatgtcattgagctgcataaaaaataatcgaatgaacatatgccaaaaataatcactaatcagtattattgcagattaaacaaataaaaatctttccataacaaatggttattcattaatcctgccataaactcgcgttattatgcattaatgcagcgaaaagctctgttgttaaagggttgcgcaacataccgcgcaaatgatactgatcataagcgttaaaaaaatctacaaaccaacgcaacacaattcatgccccggcagtatgtcacgttctcgcgtttctgaacggggaacggcgctccattgaggaagtcattcatatgaaaaatataaaattcagcctggcctggcagattctgtttgctatggtgctgggcattctcctgggaagctacctgcactaccatagcgacagccgcgactggctggtcgtcaatttgctctctccggcgggtgatatcttcatccatctgattaaaatgattgttgtgccgattgtgatctccacgctggtggtgggtatcgcgggtgttggtgatgccaaacagctcgggcgtattggcgcgaaaaccattatctacttcgaggtgatcaccaccgtcgccatcattttggggatcactctggcgaacgtcttccagcccggtgccggggtggatatgagccagttggcgaccgtcgatatcagcaaatatcagagcactacggaagcggtacaaagcagttcccacggcattatgggcacgattttgagcctggtgccgacgaacattgtggcgagcatggcgaaaggcgaaatgctgccgatcatctttttcagcgtgctgtttggtctggggctttcttccctgcccgcgacgcatcgtgaaccgctggtgaccgtgttccgctccatctctgaaaccatgtttaaagtgactcacatggtgatgcgttatgcaccggtgggtgtgtttgcgctgattgcggtgacggtggctaactttggtttcagctctctgtggccactggcgaaactggtgctgctggtgcatttcgccattctgttcttcgcgctggtagtgctgggaattgtggcgcgcctgtgcgggttaagcgtctggatcctgattcgtattctgaaagatgagctgattctggcgtactccactgccagctctgaaagcgtgctgccgcgaattattgagaagatggaagcctacggagcaccggtgagcatcaccagtttcgtggtgccgaccggttactcttttaaccttgatggtagcacgctgtatcaaagtattgccgctatcttcatcgcgcagttgtatggcattgacctgtccatctggcaggaaatcattctggtgctgacgctgatggtgaccagcaaagggattgctggcgtgcctggcgtgagctttgtggtgttgctggcaacgctgggtagcgtaggtattccgctggaaggtctggcgtttattgctggtgttgaccgtatcctcgacatggcgcgtactgcgctgaacgtggtgggtaatgcgctggcggtgctggtgattgccaagtgggaacacaaatttgaccgtaagaaagcgctggcttatgagcgtgaagtgctgggcaaatttgataaaactgcggatcaataattgaagattgccggggatatccacccggcaatgtgtgaatgcctgatgcgacgcttgccgcgtcttatcaggcctacgccagacagcgcaatagcctgatttagcgtgattttgtaggtcggataaggcgtttatgccgcatccgacatcaacgcctgatgcgacgcttaacgcgtcttatcaggcctacgccagacagcgcaatagcctgatttagcgtgattttgtaggtcggataaggcgtttacgccgcatccgacatcaacgcctgatgcgacgcttgccgcgtcttatcaggcctacgccagacagcgcaatagcctgatttagcgtgattttgtaggtcggataaggcgtttatgccgcatccgacatcaacgcctgatgcgacgcttaacgcgtcttatcaggcctacgccagacagcgcaatagcctgatttagcgtgattttgtaggtcggataaggcgtttacgccgcatccgacatcaatgcctgatgcgacgcttgccgcgtcttatcaggcctatcttaaccgttggttaatttttcaaactcttcacacccggtatcaaacccttccatacagctcaggttcaaccagtgcagcgccttttgcttgttcttctcgataaaaccttcttcaccgtttaagaacatcattcccgcccagtactcggaataaccggttcgggaaattgcagagctgcgtttgaaataccaggttgccttgtcatcgtcggccttaatgcccacgccgttggcgtaaatcaaaccaagcagcatttgggcatcgacggcagagtcgttctccagatcttcgctggcgttttctaacaggctaattgcctttggataatccggtttacccgcttgagtatttaccagaatatgcgccagcgttacttcaccttctttactgcccgcttgcgccgctttctctgcaagaacttttgcttgtggatagtccagactgaccggattggtgattttgatctgcgccagcagcgcgcaggcatcagcatcaccgctgtcggcggctttctgtgcccaatattcggctttgctcaaatcgccggagctaaaccagctgtcggcaagaaaatattgtgcgcgtcggtccccggcctctgctgcctttaaatactggctgccaggctcggagtcgttggcgtgggcaaagaatgtcaaaaacaacatcaatgcgataatttttttcattttgataatacgattgggtagggagtaaccagtataaagagttcgaatggataaaaaaacagcctccgaaaggaggctgtagaaaggacggtattacgccagtgccgcttcgcgcaggcgagttttcaacttgttgtactcgtcaatcacgtactgctcggcggcgcgctgatcggcgatcggctcgacgcgaacggcgcagtatttgtactccggcgttttcgtaatcgggcttaagttttcggtaaccagctcgttacaggcaccaatccaccactggtaggtcatgtaaatcgcccctttgttcggacgatcgctgacctgcgcacgggtgataattttgcctttacggctgtgcacccaaaccaatgcctcatcttcaatacccagacgtttggcgtcttcggtattgatttgtgcgtagccaggttcatcagccagcgccgccagtgccgcacagttaccggtcatgctacggcaagagtagtgaccaacttcacgcaccgtactcagtaccatcgggtactcgtcggtgagtttgtcgattggcgctacccagtcgcaggtgaagaactgcgccagaccgttcggggtatcaaacttctctttaaacagataagaagtcccctgatcggcatcactagtatcgcggcaaggccactgaatgaagcccagttcgcccattttctcgtaagtcgcaccgtagaaatccgggcacagatgacgcaactcatcccagatctcctgggtgttgttgtagtgcatcggataacccatacgggtggcgatttcactgatgatttgccagtccgttttcagatcccatttcggttcaaccgccttgaagaaacgctggaagccacggtcagccgcagtaaacacgccttcatgctcgccccagctcgtactcggtaaaataacatccgccgcgctcgcggttttggtcataaagatgtcctgaacgataaccagttccagatcttcaaaggctttacgtactgcgctcagctccgcgtcagtttgtagcggatcttcgcccataatgtacgcggcacgcacttcgccatgcgctgcgcggtgcggcagctcgctgatgcgatagccggtatgcgctggcaggctttccacgccccaggctttggcgaatttctcgcggttagccggatctttcacgtactggtatcccggatacgtatccggcagcgcgcccatatcgcaggcaccctgaacgttgttctgaccacgaaccgggttaacacccgcatgcggcttaccgaggttaccggtcagcatcgcgaggctggtcagagaacgcacggtttccacgccctggtagaactgggttacacccatgccccacaggatggcggcgcttttcgcctgggcatacatccgtgccgcctgacgaatctcactggcgctgacgccggtgatatcttcaacgctctccggcgtgtagccttcaacgattttacgatactcttcaaagccttctgtacgactagcgacgaacgctttgtcgtacagattttcttcaataatgacatggcccatcgcattcaacagcgcgatgttgctgccgtttttcagtgcaatgtgcatgtcagcaatgcgcgcggtttcaattttgcgcggatcgcagacgataattttcgccccgttacgtttagcgttaattacgtgattcgccacgattgggtgggaatccgccgggttgtacccgaaaacgaacactaaatcggtattatcaatttcgttaatagcattgctcattgcgccattaccgacgctttggtgcagacctgcaacgcttgggccgtgtcagacacgagcgcagcagtcaacgttattggtaccaataacggcgcgcgcaaatttttgcattacatagttggtttcgttacccgtaccacggctggagccggtcgtctggatggcatccggaccgtacttctctttgatggcgctcaggcgctcggcaacgtaattcagtgcctcatcccaggaaacaggttcgagtttgccgccacgctggcgacggatcatgggggttttcaggcgcggggtcaggatctgggtatcgttaatgaagtcccagccataataacccttcagacacagggtaccctggttggttttcccctgcgctgcctccgcccggacgattttgccgttatcgacgaccaggttgattttgcaaccacttgcgcaataggggcaaaccgtgacgacttttttcatcggtctcgctccagttaatcaaatcacgcatacgcgctctcgactacagtatgcatcttttatgccacattttatgtggggtcattccctgatattacgggcactatttattcaaaactctgacgaaaaacaggctgtcgtcagttttgacgtgacgaaacgaaataccgcgtgacagccatcacgcggcagacattttattttttctcgacgacgggacctgcctgatacccgccgcccaggcttttcatcaactgaatgctttggatcacccggcggctgtccagcatcagtaaactcatctcttcggcaagcactggcaaccgggcttcggtggcctgtaagcggctggttaagccgcgctgataggcggcctcggcagcgcgctgggtaaagcgcgtggcttccacgcgttcagcctgcatttctcgctcgtcgttgagcgtttgcagacgcgtgccgttgacggcaacgtcacgcaccgcgttcagtacactctggttgtaacgttcaatcatcatgttgctggcggcgcgcgtgccttcgagattggcattcaaccgtccaccgtcaaacagcggcaatttcagacccgggatgaagttgaactggcgactggtttttttgaataaggtatgcagatggatggagtccagaccgaaaaacgctttgatatcaaagctcggatagaacaacgcccgcgcggaatccacctgatctaaactcgcctgaacataccagcgcatggcttgcagatccgggcgtctggcgagcaactcataagagagtgtcgccggaatgccggtctggacttgcggtaatgccaccggtctgatctccggcatatcgctggctcccgcgccaatcaatgcacgcagagattctcgcgtttcggtgatttgccctttgacggcaacaatttgtttatcgaccgccagaatctgtgcccgcgcgccgtggaaaggcacttgcgcttccagaccgtgcgccactttactctggtgcgctttcaccgcgtaatcaatcacatcgtgagtttgttctaacagatcgagcatctgatagctggcctgcatactgtaataaagctgcgctacgcccgtggccaggcttagctctactgctgcggtttctgccagcgcggcattatgcgcgccaatggcggcggcaaccgcactgcgatgcacaccccacaaatcaagatccagtccggcaaacaaacctactgtggcttccgtatagtacggcccgtccatacccagtgctggcgcatccatactataagggcttaaaaagccgttcgcgctgacacgttggcggttgagcatccctaacgctgcgacctgtaattgactaccggcatctaacaaatcggcctgggactgcgctttttcttcccgcagtttcgcttcggcgagggtgtgactaccacttagcgtccgttggatcagcgcatccagctgcgggtcattgagttgtttccaccactgcgcctgcggccagccggagctggcaagatgaatatcgtcggccagtttgatttgttccggtttgagctgttgatgaggtgcagaatccttacgtaccagggcacagccggaaatcagcgtcgtgctgccgagaatgctgcacaacagcagacgactaagttgacgattgatcattgcgtggctccttgtgcctgttccgtggcgggcgttaatgccggggctgtccagtctggcaagcgggcgaaaagctggcagacgtgttgctcctgttttaataaggtgggcaggatggcctgagaggcgggtgtctcttcaagcgttatttgaggagaacggctgagtgcggttgccagaccggcagcgtatttctccagggcgtcggcaaactgacctgctctgtccggctgtagtgcgttatccagcgcctgcgcgctgttccaggtggcatcccaggcgtgaagaagatcgcggccctgacgaataaccgtttggctacgttcaatcagtaatgcgcgttcttcgctgtccagttgacgctccagcgccacgcgttggcacatctcttcacaggcattaaacgccgcatgcagaccgatacgaatttgcagataagtgcgcagagccgtgacttcctgctggcgtgggatccgcattactttacttaacatacccagcgtgccagccagtttttgcggcagtgtgcgcgcttcactttcaggccagacaaaggtgtaaatcaccgcggacaccacggtaccaatgatgatacccagggcgcgatcgcgaatttccaccaggtcgtacactgggccaaaaacgttttcgagcgtggcgagcgcgaaggtgaccaccatctgtgtgccgatataagaagagcgttcagagctggtggcaatccatgcgcccaacaggaaaatcggtgccagcacaaacagcaattcgacaatattgtccagccagggcatgaccagtagcgtgaataacagcgccagaatcgcgccgcaaaaggccccgccaaaacgcagcaccatcttctggtagctgctaccgacatttgggttagcgacgatcacgcatgtcagcatacaggtgtgaatgccttcccagtccacgccgctgtaaaaggtgtaacagatcaaacaggcgagcagcgtttttaccgcgtagcgcatatagtctggattggtaaaagcatcggcggccatacttggcggtttggctgcgggcgttggcggcgtattcgggtccatctgacccagttgtaacaacgtctggcagatattctccaggttacattcccgtgccgccatcgcttcactttcactgatccgccagtcgctttgccagcactgaccttcagcaacggcatgctgcagcttgttgatttcactagctaatttttgtcggaattcaataattgcctgagaatcagcaaaagaggtgggatcgtagcgattcagcgtgctgtaaatgtaggttaccgttgccacgcagctttgccaccatgcgttttgagttcgccagttggcatcgtccgcgaggcaaaagacattgagtttttgtagcgccagcgcctctctttcaatccgcgtttcgggtagcggtgcgaggctgtctgtcaggtgactaatggcatcatcaagccgatcattaagcgcctgatgcatttggctaatggcacgactgggaaaccacagcacgccgattaacgtcatcagcaaggttggatagaggccaacaacgatacaccacagcgttaagcgcacgaccacttccggatagtcgagcatggcggggaaggtttgcccgtaaatagcgacaatggcgacggcgaaaaagaccagccccaagcgatgggtgcgcatcaaaaacatgcagcccatcaggatcggtccggcgatgatcaatcggatcaacggttcgccgtaactccatttgtagatcaaaaacaggctgccgatctccagcaccgtggcaaccacaaacaagatcgcgacaaatttggtgtaaaacgcgttgctctgaataccgtaaaacagcactgccaggcttaacgccacaaaagggatctcaaaggtcatgctgatcagaatcaccagcaggcagcctacccagagttgcacggtctgcggcacgcgacctggtcgccgctcgcttaactcttcatgaaagaacgccagcagcctgaccaccggtaatggcagggagttgagcgcgctcattattgcggctcaagattagcgactgcgctagcgccgatgcggaacatttccgggtcaggtttatcgaccatgattttgaccggaaaacgctgggcaacgcggacccagttaatagaacgagacactttcggcaggccgcccagcaccaggccgccgtcatccggtagcacgccgtagccaatgctatccactttaccctcgaaggttttgccgctgtcactcatcaggcgaatcgttgcgggtgtaccactgcgaatatttttcagatcggtttcgcggaagttggcgatcacataccagtgacgagtgtcgattagggtaaaaatagggcgcatggcagaagcaaattgcccgacggaggttttgagggaaatgacccggccatcaaacggcgcgcgaacggtcgccatttccagatgcagtttggtcagggcaatatccgcttcgaccgccgcacgctgggcaactaatgcatccacgccgctgacggcgctggcggcactctgcgcctgtaacaatacggcattaagatccgcttctgcggcgcgctgcgccgttcttgcacggtcaacatcttccgcactgacaaaaccttctttcagtaatggctcggtgcggcgtaatgtatctgtggcctgtttcgcggcggcacgggctttttctatcgtggcattaacgctgtcggcaccaaactgttgcgcgtcaacgctacgctgggtgagcataatttgcttatccagcgccgcgagggaggcttcagctttcgccagattggcttcgtacgggcgcgggtcgatgcggaacagcaaatcgccctgtttgactgcctggttgtcggtgaccgccagttctacaatgcggccgctgacttccggtaccacatcaatggtatctgcactcgcgtaagcgtcattagtacttggcgcactgtctacgcgccagataacgaaaacaagggcaaccagcgccaacgcaaccactaacagagcagggaatttactgcgaggagcttttttcggcgtactttccatgagcgcgtctcaaatagattagaaaaatgccagccagaacagcatggcgtagagagcaaaaagggcggtataaataattccgacaaatgccagattgatatttgcccgctgaataactcgcctcgtgatgagcgtcaaaataaggctggcaatggcgcagaaaaaccagctgggataataagcgccgatcaccgggattgccggagataatgagcatcccgaaaccatgaagacgggaattatccaggctgtttttttgagttgcatcgccatgcgagagagaactgttggcatattaaatacatcctgtctgctgcgaacaatatctgtagtgaatatcaatatccattgaaggcgtcagtatggctattttcttgatgaataaaaatagctttattcagccaccgcattcataacttatatattttatttattaattggctgtatatatttttaaaataaatacttttgggggcttcagcgcccccaaaagcgagtgacattaatttggggttacgatattcacccacaaatcgaaattatccagacaggcgataatttcttccagtttcgcgccattgccaataattttggctttcttcgcttttaccagatccgccattttggcttgtccggtcagcacggcgtgcagatcttcacggctgatgtagaaagaggcgtcggcttgcggttgcagcgttttccggtagttaagcacgctatcgttcagcgtcaggttgaggttatcgccgttgctcatattgaagttcaggctgatatttttacccgcagctttcgcgctatcgaggcgaacggccataaagtcgaacagcatttcgacgctcatcccgcgaatggtgtccggggaaccggtggtgccgtggctgaacttatgcaccccttcgcgcagctctttcgcgccggtcaggtagaaaccgcgccatgtggcggactcggcctgatagcccagctgttcaaagttattcgcttgcagattcttcgcgacctggtcacccgggttggcggcaatcacctgtttcagcagttctgcgctccagcggtaatcaccttgcttgttcgcttcttgcgccaggttgatgacacgggcagaaccgcccagcgcctgcacgtaacgtttacccatctccacctgaccatacggatgcaggttagccgggttaccgtcgtaatagccaagatagaagttatacaccgcgcgggcgttgtggctgacagaaccgtaatagccgcggctggcccagttattggcaagtgcaggcggcagcttaatcatgtcgccgatttcattcatggtgtagccctggttcgccaggtgcagggtctggtcgtgaatgtacttgatggtatcgcggtatttaccaatataatcattgatatgcttattgccccagaccggccaggtgtgcggcataaacagcacttccgcgtcgttaccccacatatccagcgtttcgttcagatactcggtccacttgctggtgtcgcgggttttcgcgccgcgcagagtgtagaagttgtgcagggtatgcgtggcgttctcggcggtacacagggctttcagggccggaatatagaagtgcatttcggctggcgcttcgctacctggggtcatcaggaagtcaaactccaggccgtcgataatcatcttctcgccagttctgacgatagttttcgtcggtgcaataatgctcgggtcgcccgttgccagcgtcacgccaaggccattacccacattgccttgcgcgttgtgcggcagtaacagaccgtaagagtagagcgcacggcggctcatgatgttacccgccagcacgttttcgctgatggcttcgtccataaagcctgcaggggcaatcacctgaactttgccggatttaacatcggcttcagagataatgcctttcacgccaccatagtggtcggtgtggctgtgagtgtagataacggcaacaatcggtttttgcggacgatgctggaagtaaaggtcaagtgcggcttttgcggcaggcggcgtcaccagcgggtcgataacaataatgcctttctcgccctcaacgaacgtaatgttagagatatcctggccgcgcacctgatacattttatcggtgactttgaacaggccagaaataccgttgatttggctctgacgccacaggctggggtttacggtttccggcgctgcggcattaatatcaaatttgtaatcgtccgcgcggtagtaaactttaccgttcgcatcacgcagaataccttcatccagcagcggggcgataaatccacgctgggcatcgtcaaaatcctgacgatcgctaaacggtaaacttttggcgtaattctgattaacctgttgggtatattgagtggcggctttcgcttcctctttcgcgttagcggtatttaccatcatgccgctggcggcagttaacgcaataacaatcctgctcaaacggaataaccgagagttattcatataaatctccatttatcatttatgtcgtaaatatgtaatccatgcaaaatacgtcatttaaagctggcgttatcataattgggaaattgcgactttaataagtggaagtgtgagcggaacgcgccattttattaggcatttgtgctgaagagggaaaattacagtaaaactatcattgcagaaaataatatgagtcgttttatgtgtttattatatatattgtacctgtcgttggcacagcgggacattgcgctactgtgccaacgttttactcatggggctttagcacagaactgtggcaaaaaacgttgatgcgccaatattgctgcaccctgagcgccattaaagtcagaagaactggcggcaataaagcgcacgacctgatgcggcagtggacggcgcaggtacttttgggtcatggcaacgagagtctcgcgtgggaaggcgggcatatccatcacgccaccgcccaggatcaccgcatcgggatcgaacagattaatgctggtggcaatggcccgtgccgcgttttcaagcagactctggacgaaaggggcgttttccgcatggacgaaaagatcgcgcaatgggtaatttcggggctgttgttcgtaccagcgtcttagcgccattccagagcaattggtttccaggcacccaggattgccacacgcgcagtgttgggtcatatctcccagggggatatgacccagttcgcctgccacaccgtgtgcacccgtccacggcgcaccgttcatccacactgcgaaccccatccccgtaccgagataggccgccagaaccagttgttgcgtaaggcggttttctactacgtcccaggagagttgcaggttaacgtcgcgggaaaactcaaccggacaattcagcgtattttcgagcttatcggcgagatcatataaatccgccgctgttaacggcaggttaggcgtagaaataatggtgcgtttatctttactgaccagcgccggaaatcccatcaccagaccatgacagcgagcgttaaagcgcctgagttgctcgtcaatcatttcgccgataccgctcaccaggccgggagcaatgacttctgcggtccgctttttttcgcagtgtagcgtttcaccttctgctgtccgcagacaaaagcggatatgcgttgcccccatatccacgcccgctacgacgttatgctgtttttgcatgaggctgtacctcgctttttgcagccagaatctgcgcggtcataattctccatgcttcgtcgatattttccgcatgattaaacaggccggaagtgccgacgataaagacatccgcccctgccgccatcagtttttcgtaagttgcctggttgcaggaaccgtccacctcaatttcgtactccagaccttctcgttcacgccatgccttcagttcggcaagtttatccagcatttcaggaatgaacggttgtccggcaaagccgggatcgacagtcatgaccgtaattttatcggccttatggatatagtatttcatggcctcaactggcgtctccgggttaaggatcagccccactttcatgtcatgacggcggatttcatcaatcaggcggaacgcctggccgttgatggtttccggatgcagagtgatgaaatctgctcccgcacgcgccagttgagcaatgtaatcctgcggccgcgtcaccatcagatgacagtcgagcggtttagttgccagttttttaacctgacttacgaagaacggactgagtgtcagattggggacaaagtgaccgtccatgatatcgatgtggaagtaatcggcatggctgtcgataaattcgatctgttctttaaatttcagcagatccatacacattaagctgggggagattttcatgttcaattccttacttactgataagacggtcaagggcgacagccgcgataattaatccgcccatcaccaccagttggtaataggtttgtacctgcaaaatattcagaccgttgttgatggtgccgatgatcaacccgccaatcaccacagagaaaatgcgccccttgccgccgaagaaactggtgccgccaatgatggcgctggcaatggcataggtttcaaaacccataccggcaagcggttctgcggcaccgagtcgtgcagtactgacgacgcctgccagacctgcacaaacaccggagatgataaacaccaccaggatgtggaatttcacgtcaatcccggaatagaacgcgctatttttgttgccgcccagtgcgtagatgttgcgcccgagccgcatacgcgttgtcagaaaccaaaggatgagcgcgacaattagactgaagataacggggacaggtatcccaattacgctggcggcaaagaagttcacgaagtcaaaactgaagccgtatacgctgttggcatcggagatcaccagcgtgatcccacggaaaatcgcgttggtgccaagggtgatgatgaacgggtgtagccccgtccagttgaccaggcagccgttgatcgcccccagtgcgccgccaaccagtacaccgccaatcatcgctgcgagaaacgggtcaacacctgccaacatcagtttggcggtcaccataccggaaagcgccagaatcgcgccaacgctgaggtcgataccagcgaccaggatagcgaaaaactcgcccatgccgatcaataccgtcacggagctttgaataaaaatctgggtaatattattggtggtcagaaaatattctggactcaggctaccaaagatggcgacgatgatcgccaggataaaaaaggtgccgtatttatcccagaacagcgcaaagttgaacggtttcttctcgctcgcttcgctttttactcttgtggtaaagcccatgccataatctcctcttcgctcatgtcatcgcgattcgtcaggatttgcgtcagtcgtccttcgcagaacacggcgatgcggtcgcagacggtgataatttcaggtagttcagaactcaccatcaggatgacttttccgtcgtccgccagttggcgcatcactttgtaaatttcggctttcgcgccaacgtcgatgccgcgggtaggttcatcgaaaataatcacttccgggcaacagcacagccatttggagatcaggactttctgctgatttcccccggagagttcggtgatattctggtttacgctatgacatttcagcgccagcagttcgcgttgattttcagcggtacgttgctcgtcaacttcatgaaacaagcccatcgcgcctttatagccgccgtctttcagactgcggctgatcgccatgttctgagcgatggaaaagttggggaaaaaaccgttatcccggcggctttcagtgatgtaagccatcccttttttcacggcatccaggggactacgtggagagatatctttgccattaagacggatttctccgccagcgcgtttatccacgccaaacagacaattcatcagttcagtacgtccggaaccgaccagtccggcaaagcctaatatttctccccggcagacgctaaaactgatatcccggaccttttttctgtcacgactggtgacgttccgcacctcaaaaaccgtttcgtgcgcaaggttgctgacattctccttcatcgcgttaaaacggttttgcagttcgcggcctaccatcagacggacgatatcgtcattactcacatcgcttactatgccgctgcaaacgctgctgccgtctttcatcaccgtatagcggtcgcaaatacggcgaatttccgccaacttatggctgatatagacgatggccgtaccctctttacgcaactgattcatgatcagaaacagatagtccacctctttattggtgagactggaggtgggttcatccatgatgatgactttggcatcgagcatcagcgttttggcaatttctagcatctgcttgtggctgatagataaattcgccactttctcatctagatcaactttcaagcccacgcgtaataacatcatggcggcgcggacacgcatttctcgccagtcgataatattgacgccacagatttttttcgtcagatgacgaccaatatataaattttccagtacggttaattcatcaataacgctgagttcctgataaataatcccgataccgagttgtgccgctaatttatgatccagcttgttatagctaatgttattaatggtaatggtgcctttggtcggctcatgtattccggataaaactttcattagcgtggatttacccgcgccattttctcctagtaatgcatgtatttcaccaggataaaccgttaaattaacgctctttaatgcgtgaaccggaccaaaggacttgccgatccccgccatgcttatatatggcgtggccataaataacctctctgcacgaaatatcgtattattgcctgatggctacatttatcaggtctacgttcaggttattttgttggccggataagacacttcattagcatcatcatccggcatcattcagttttattgagtgaccaggatactatcgaccagtttaaattccggtgctttatccagcgggataaccttgccggatttctcagcgtcaaccatcagcttcagacccgttgcgccgatatccgccgggttctgggcaaccgtcgcggtcatttgtccggcttccaccattttgcgggcttccggaatgccatctgtaccgacgaccagcacttttcccgtttttccggcgtttgcgactgcctgagcaacacccattgccatcgtgtcattcgcgcaatagatcgctttaatattcggattacgttgcaacacgttagtggcgacatccagtgctttaatgcggtcccagtcggcaggctggctggcgacaagcttgatctggcttgcttttttgaaggcttcggtggcaccattacgacgcgcttcaccggaggcgttaccggctttaccctcaatgattgcgacttcaccaccttcagcgcccaatttgtcaataatgaagctcgcgcctttcgccccgacagcaacgttatcggtggtgacaaaagcttccacattgccgccagcttttttcagattatccatgtcgattttttcatcgagattaaccagataaatgccttttttccatgcgcgggcgacaggcatgaccagattcacactggataatggagcgaaggcgatacctttgtaatttttattactgagatcttcaaataactgcaattgagattgaaaatcgccttcactaggagaggcaaaaatatcaacgctgacgcccagtgtttttgcttcatcttcaatgccttttttcatatctacccaaaatgggttggagagggttttcaatacgacagcatattcggcggcagcaaaagcgctggtactcaacattaagcccacgagtgtgccgctgaaatatttcagatatttattcataataatgttctcacggtaaggggacaggtaactccgcgatggcggaattacctttttcttatttcagcgcgcctggactgaagaaatcaacaattgcgccggttttttgcatattaatattagcttgttcaatgttgagctgggcgacagagacaaaaaaagcgtccagcaaagttagttgtaatattcttgcgctggcattacgacctaataacggcgtttccggggctggactgcaaataatataatcggccagtttcgctatcggactatggtagctatgggttatacaaataatctttgccccgttcttttttgccagttctacggccgcttttacatcactggttcgcccggaatgggtcactaccagcacaacatctccttcctgtaacaagctagcggacatcatcatgatgtgagcatcaggataggcctgacagcgtacgccaatgcgcaagaacttgtgctgtacatcagcacagatagcattacttcctccggcaccgtacaaatcccgctgtctggcctgatagaaaaagcgggcggcacggtggatctcatcaacgttgacgatgctctgaccttccataatggtgcgtaaagtgatgttaaataccttattcaccacatcctgcggcgcttcatcaaaagccaactcggaaggcaatacctgttcactctgagaaaaataatcttccagcgcactgcgtaagttacgaaagccgctaaaccccagcagcttacttaccttaactatcatcgcttcagataccgccagagcttctgcgacatctttaattgcgggtgcacaactcaggttaccgggtttgagtaaccactccacgatgcggctttcattttctgtcattccttcctgcttcattcgcaggtaaggcgctaaccctataccgttcggaagcgcactatcaaactcactctggctcatcacgttctcttgtccttgaattgaagacgccactatatcaccacagcaagaacagaaaagatgctggcgacttcacaaaaaaataaaatttataaagtttattttattgtgaacaatggcgagtggcttaaaattttatttcatttaattagtttaaaaacatgatgttatttgtttttctggttttttagatgatagatgttgctggatggtgagtgtctttaacgctattgcgctgtcagatgtaactctgtaaaacagatcaggaaggcgtaattcatcgattttgggtgtttttaattcattaacatcacaaatgttttttgattgtgaagttttgcacggacggggaagatgaatgaaaaagattgcatttggctgtgatcatgtcggtttcattttaaaacatgaaatagtggcacatttagttgagcgtggcgttgaagtgattgataaaggaacctggagcagtgagcgtactgattatccacattacgccagtcaagtcgcactggctgttgctggcggagaggttgatggcgggattttgatttgtggtactggcgtcggtattagcatagcggcgaacaagtttgccggaattcgcgcggtcgtctgtagcgaaccttattccgcgcaacttagccggcagcataacgacaccaacgtgctggcttttggtagtcgagtggttggcctcgaactggcaaaaatgattgtggatgcgtggctgggcgcacagtacgaaggcggtcgtcatcaacaacgcgtggaggcgattacggcaatagagcagcggagaaattgagattcatccactacttgcatggatgagtaatgattaatgtggatagagtttctttttgaggttggctaatgaaacgctttccgctatttcttttattcaccctgctcacgctgtccaccgttccggcccaggccgatattatcgacgacaccattggcaatattcagcaggcgattaatgacgcttataaccctgaccgtgggcgagactatgaagatagccgcgacgacggctggcagcgtgaagtgagcgacgatcggcgcagacaatatgacgaccgccgccgccagtttgaagatcgccgcaggcagctggacgatcgccagcgccagcttgatcaggagcgtcggcaactggaggatgaagagcggagaatggaagatgagtatgggcgatgaggttgggtatggagcaggcatcgcccctcaccccaatggggagagggagaaaacgagcgcaatattcaatatcgagcacaatcggtcccctcgcccctctggggagagggttagggtgagggggccagcgcgcacattccctctcatcacgccaccccaatctccatcccatcaaaccccacctcaaacccactcggtagtgcgttttccatcagccacgcatcaaactggtggctgatatgggtcagaatcacccgtgggctgcggataacctgattcagcgcaagcacggtatttaaatcacagtgattacgcggtgcatccgcgcgcggcgggtgactgcaatccatcaccattacctgcggctgattattgcgtaaaaatttcagcgttttttccggcaagcctgcggtgtcagacagccacgccacccggctgtgtgccgtttccagcagataaccgaaggtcagtttactgtggttgagcggcaggggcgtgacctgtaacccctgcaaatcaaacaccacaaacggttccaccgtgtggctgaaatcaagcaggcccggatgtttaaacagatcgtcgcagccctgttcatccggcgggccgtaaaccgggatcggatcgccaacgccccagcgcagcggaaacagcccctggacgtgatccatatgataatgcgtcagcaaaaactgctggaagcttccggggctccagcgatcggcgagatcgtgcagcccggcgtcgatcagggtgattgcgtcgttaaacttcactacgccgctgcacggttggcggcgatactgcgggctgcgccgcgctctggcgcaggccgcacactcgcagccccatgccggaacgccctgtgcgccgccggtgccggtgagcgtgagggtcaggctcatgttacagcgccttggtgaagcggaagtggctctgctcgtagccttcgcgcagatagaaacggtgcgcgtcgtggcgcttcacgttggtgctaagttcggtcatttcggccccggcctggcgggcttcttcttctgcccacgccagtaacttactgccgacgttcagaccgcgcgcctgcggcattaccaccaactcctgaatttcgccgatccagttgacatgatgcagatgaaactgcaaatgcaggccgatcatgccgacaacttcgccatcaagcagcgccagatggtagcgcatgtttgggtcgcgcagattggcgttaaaacccacgcgaaacgcgtggtggtcaaactccgcctgttttagctcacaaatcagcgcgtaaaccgcgtcggtgtcgtactgcgtggccgggcgaagctcacaagcaggcatggtgtttctccttctgatggatcagcgtcagcagcgtgtcgacgctctggcgcaggctgccgtcattgttgagcgtatggcaatcctgtggagtatagcgggcggcgcgcgccaggcgggcgttaatttcactggcgttttcacggccacggttttccaggcgctggcggaggatctccgggctaacctgtaaacagacgggcagcagcgcgctttgatagcgcgcccgcgcctgcggcagatgggcgcgactgccgttgaccagcacgtcgaatccggcgtgcagccagagatcaatctcgacgccgacgccataatacagaccgttagcgtgccagcttaaggccaacagattttgccccgcgcgggtaaaaaactcctgctcgctcagggcgatatggttttcacttccggcgctggcatcgcgcgtgatgtagcgatgcgccaccagtaactgagtttgttcccgcaggcggagttccgccagcaggctgtctttcccggagccggacggccccattaaccaaatcagttttcccatcatcagaacacccttttaccctgacgccagacgtggtcgatatgaatatgattgtccttgcgatgcgccagcaccaggtcggcgcgtttgccctcgccaatcaccccgcgatcctggagattaagcgcctgcgctggatttttagtcaccagcttcaccgcctgcggcagcgtaaagcggttgctctggtcatcggcgacgcgaaatgccgcatcgagcaggctggcggggtagtagtcggaagagaggatatccagcaggccaagctgcgccagttcactggccgccacgttgccggagtggctgccgccgcgcacaatattcggcgcgcccatcagcacgttcatgccatgcttgcggctggcttccgccgcttcgaacgtggtgggaaattcggcgatcacgctgccaagctggtgagattcagcaacgtgggcgtgggtggcgtcatcgtggctggcaagcgcaatttttcgcgcgcggcacagggcggcgatggattcgcgattcggctggctccagcgtgcggcgagcgccagttgctcttcttcgtactgctgcatctgcgcatcagtgagggagtatttgccctgataatattcgcgatacttctcgcggttggcgaactggcgctggcccgggctgtggtccatcaggctcaccagcgtcaccggctcgcgctgcaccagtttttcaaacagcggcagcgtggtgtgatgcggcagttcgcagcgcagatgcagacggtgctcggcgcggttgacgccgcgtttctgcgtctcttcgatggcgttgatcatcttctccagattctccagccgatcgccgccgtcgcgcacgtcgccaattgccacggcatccagtacggtggtgatgccgctcgccaccatcagcgcgtcgtggctgctcatcgcgctgtgggcaggccagtcaactttcgggcgcggggtgaagaatttatccagattatcggtatgcagctcaatcagccccggcagcagccagccgccttcgccgtccatcgcctccggcaggcggctctggctttcggcaaaggcgcggatttcgccgttctgcacctccaggctaccgcttaccacctcgttttccagcaccagcttaacgttattgataatcatgaagaggctcccattgggtgttagctcaactagaggctcccattgggtgcaggcggtcggcgacgtcattacgtacagcttcgtcatggaagatgcctacgatggctgcgccacgggttttggcttcgcgaatcagttccaccaccgcggcgctgtttttggcgtccaggctggcggtaggttcgtcaagcagcagaatggggtagtcgacgataaagccgcgggcgatgttgacgcgctgctgttcgccaccggaaaatgtgcttggtgccaggtgccacaggcgttccggcacgttcaggcgggtgagaagacgcgcggctttagcggcgcaggcttcacgcggaacgccggtatcgagcagcggctgcatcaccacttccagtgcactgatacgcgggatgacgcgcagaaactggctcacccagccgacggtggttttgcggatttccaccactttgcgcgctggcgcggtgaccaggtctacccactcgtcaccgtgtttgatctggatttgaccttcgtcgggcagatagttggcgtacaggctgcgtagcagagtacttttgccgctgccggaatggccgtggagcaccacgcattcgcccgcgttgacggtgaggctggcgcgattgaggacgggcaggcgcacgccgttttgctggtgcaggatgaaggttttactgacgttttgtacgttaatcatttttcgcctcgtggttcgggtgtcggatgcgacgctgacgcgtcttatccgacctacggggagcgcatttgtaggccggataaggcgtttacgccgcatccggcaccggctcaattctgcaaaacgctactcaccagcagctgtgtatacggatgatgcgggtcgtcgagcacgcggtcggttaacccactctccaccacttgcccctgcttcatcaccagcaaacggtccgccagcaggcgggcgacgcctaaatcatgggtgacaatcaccaccgcgaggttcagctccaccaccaggccgcgcagcaggtcgagcaggcgggcctgcacgctcacatccagcccgccggtcggttcatccataaacaccagcttcggatgcgtcaccaggttgcgggcaatctgcaaacgctgctgcataccgccggaaaaggtggtcggcaggtcgtcgatccggttggcgggaatctccacctcttccagccacttctgcgcggtggcacgaatatcgccgtaatgacgtgccccggtcgccatcagccgctcgccgatattgccgcctgcgctcacctggcggcgcaggccgtcgagtggatgctgatgcaccacgccccattcggtacgcagcaggcgacggcggtcggcctcgctcattgcatacaggctacggttctcgtagtgaatttccccctgctgcggcgtcaggcgcgcggagatgctcttcagcagcgtggtcttcccggagccggattccccgacaatgcccagcacttcccccggccataaatcaaaagagacatcgctaaagcctttgcccggcgcgtaaaggtgggtcaggttattgacgctaagtaacggttgattcattggttttttgcctcgctctgttggcggcaataatcggtatcggagcagacaaacatgcggtttccggcgtcatccagcaccacttcatcaagatagctgtgggtgcttccgcagatggcgcatggctcatcccactgctgaacggtgaacgggtgatcgtcgaaatcgagactttccacgcgggtaaacggcggcaccgcatagatgcgcttctcgcgccccgcgccgaacagttgcagggcgggcatcatgtccatttttgggttatcgaatttcgggatcgggctcgggtccatcacgtagcgcccatttaccttcaccggataggcgtaggtggtggcgatatgaccgaagcgggcgatatcttcatacagtttcacctgcatcacgccgtactcttccagcgcgtgcatggtgcgggtttccgtttcgcgcggctcgataaagcgcagcggctcggggattggcacctggaagataattatctgatcttcggtcagcggcgtttcggggatgcggtgacgcgtctggataaccgtcgcatcgtccgtacgttccgtggtgtttaccccggtcacgcgcttgaagaagttgcgaatgctcacggcgttggtggtgtcatccgcgccctggtcaatcaccttcagcacgtcgctttcgccaatcacgctggcggtaagctgaatgccgccggttccccagccgtacggcatcggcatctcgcgcccgccaaacggcacctgataaccggggatcgccaccgcttttaagatggcgcggcggatcatgcgtttggtctgctcgtcgaggtaggcaaagttgtagccgctcagattagccatggttctgctcctgttgcagacgtttgagtagctccagttcggcctggaaatcgacgtagtgggggagtttgaggtgactgacaaagcctgcggcttcgacgttgtcggcatgtgccagcacgaactcttcatcctgcgccgggcctgtcgcgtgctcgccgtactccggggcttgcagagcgcggtcgaccagcgccatcgccatcgctttgcgctcgctcatgccgaacaccagcccgtagccgcgcgtgaagtgcggcggctcacccggcgggtcgataaaaccgttaaccatttcacactcagtcatcagcagttcgccgacgttcaccgcaaatcccagctcttccggcacaatgctcacgtcgatatagccgctgcggatctcgcctgcgaacgggtgattgcgcccgtaaccgcgttgggtggagtaggccagcgccagcaaatagccttcgtcgccgcgcatcaactgctgcaaacgggaggagcgactgcaggggtaaaccggcggcgtgcgggtgatgtcatccggctgtgcgccgctatcctcttcaaacttcgccagcccctgacgcgccagcaggctgaaaacgtgcgggctcggctgctgttcgctgtcggcggtggtcagcgtcggcgcttcgccgtttgccagcagggtaaaatcgagcaggcgatgggtgtagtcgtaggttgggccaagcagctggccgccgggaatgtctttataaacggcggagatacggcgttcgagacgcatcccggtggtgtcgagcggctcgcttaccgccagcttcgccaacgtggtgcggtaggcgcgcagcaggaaaatcgcttcaacgttatcgccgctggcctgtttcagcgccagcgccgccagttcgcggtcggcaatgccgccttcggtcatcacgcgatctaccgcgaggttaagctgctgttcaatctgggcgacgctcagttcgggcaaatcggtatcgcctcggcgtcggctctcttgcagggcgtgggcggcgtcgatcgccttctcgccccctttcacggcaacgtacatcagcacacctccacatgagtggttcgcggaatagccagcaggcgctcgccacaggtcaggatcaggtcgatgccgagcgggaacggatgcgggcgctcggtgagttcgtgcagaatgcactccggcagctgcggagcgatcattcgttcttcggcaatacccgcaccagtaaggcgcaacatgcgtccgccgctcaggctggcgacctgtaaaatcagcgtcgcacccgcttccggcgcaacggcggtgccggtggaaagggcgttgagctgttcgctggaaatcgcctcatccgtcaccgcgaaggtcgcctgttccggctggctgaccagcggcgcgttggtatgaaaacgcaggctctggttgacgatatcgttatttaatggggtagaaagccacaccggcgtgtcgttatcggccagcgtcagcagcacgctggtggtggcgatattcagcggttgccagccgcgtttgagctgatgcagggcgacaatcacgcccggctcgctcatggcctttaacaggcgacgaaaactgtgctgggcatcctgcacgggaagcataaaagcggtttccagggtcatgcgttgtctccgcgaaccatcgtaaagaagtcgacccggctggcgttcacttcggcctggcgtgcggcaatgcgtgccatacggtcagcgtccagcggggcaataagggtttcacttaagttttgaaagtggcgagattgctgcatcagcgcgtcaatcagcgcgcagcgttcggcgtgctgtttatcacgcccctgcacccagctgtagccgagcgtgccgtcagtcaggcgcacggcggcgcgggtcagcgtggcgtcgccggcaaaaaaacgttcgccggtgccgcccatccgcgcctgaatctgtaccaggccagtttcagcggcgcggatcacctcatagtcggcggtgatgtttagcgcgttcaggcgtgctgccagttcagccggttggctgtgcgccagcacggacatccagtgctggcgggtcgcggtatctgcgtgcattcagtgctccatagtgaattcaatcatgtcggcgcgcgtcaggctgacggagtactccgccgggctgctttcaccgtcacggtggttaagggtgcgcacgcacagcagcgggctcatattcgggatttcaagacgctggcactctttggcctgggcgcggcgggcgctgatccgcgtctggctgcggcgcagcgcaattccggtttgctcgcgcagaaaatcgtgcaggctgccgctgtcgaagcgttgcagcgtcggccagagggtgaggtccgcgaagtagtggtcgattaaacagagcgcgacgccgttgacacgacgcagggtgcgcaggtggatgacgttctccccctcggtaatccccagtgcgtcagcgacgtggccggacgcggggcgcaatacgctaagcagtttttcgctggtgggatggctgccctgatccagcagattctggctaaaacgcgcctgggcgttgagcgggtaatcgaacgggcgcatcagcaccagcacgccgacgccctgacggcgctgtacccagcctttttccaccagttggtcgatggcgcggcgcagggtgtggcgattcacctcaaagcgcgctgccagttgctgctcggcgggaagatagtcgccgcagcggtagtgttgacgaagctcctgctcaagttttgcggctatctcttgatagcgtgttgggtagctggtcggatgtgtagacaagtgcatagatatcaatgcctcgcttatcagataaagtgcttacgcaaccgttgagagaggaaatccagcaggctgaccgtgacgatgataagcaccatcagggcgcaggtttgttggaactggaaaccgcgaatcgcttcccacagggtgacgccgatcccgcctgcgccgaccatgccgacgacggtcgccgagcggacgttggattcgaagcgatagagggagtaggagatcagcagtggcatcacctgtggcagcacgccgtagaggatctcttcgagcttgttggcaccggtggcgcgaatgccttccaccgggccgggctcaatcgcttccaccgcttcggaaagcagcttggagagcacgccggtggtgtggataaacagcgccagcacgccagcacgccagcgaacgggccgaggccgacggcgaccacgaacagcatggcgaagaccatttcgttaatggcgcggcaggcgtccatcaggcggcgaacgggctggtaaacccaccacggcaccaggttttcggcgctcatcaggccaaaggggatggagagaaccaccgccagcgcggtgccccagacggcgatttgcagcgtgacggccatttcggtgaggtaatcctgccactggctgaaatcgggcgggaagaagtcggcggcgaacgtcgccatgttgccgccgtctttgatcagcgtaagcggggccatttccgcgccctgccacgagacgaccaacacggcgagtacaacggcccagctcagaagcgagaaccagctgcgcttgggtggggcgatggtgatggtttgcatgtttggctccggtctgtaggccggataaggtgcttgcaccgcatccggcatcaacgcctgcacattgtcggatgcgacgccggggcgtcttatccgacctacgatttactgcaccgctttactcacgctactcatcgcgcttagcgcgttgttcaggcggtccaggtcatccagctgcgcctgaatctcggtggtttttgccagcttgtcctgctcattcagtcctttattgcttttcacgccctgcatctctttaaacagcgcgagctggcgaatcggcaccagttgcaggtcgctggaagcgcggaatggcgcccagcccaggcgttccagcaccgctttttcttccggcgttttgccgtagttcataaagaagtcgtagatcttgtctttggtggtttcggaaagattcttgcgccagacgatcggatcgcctgggatcagcgggctcttccagatcaccttcagttctttcagcttctctggcgcggaggttttcagcttgtcgaggttttcggtgttgttggtggcaacatccacctgcttgttggcgacggccagcgcgttggtttcatgcccggcgttgacggtgcgcttgaagtcgctggcggagatattgtttttggcgaagacgtagtagccggggacgaggaagccagaggtggagttaggatcgccattgccaaaggtgagatctttccgcttcgccagcagatcgttcaggttgttgatcggactgtctttgttgacgatcaacacgctccagtaacccgggcttccatccgccgcgaccgtctgggcgaagacctggccattggcgcgatccaccgcttccatcgcgctcagattgccgtaccaggcgatatccactttattgaagcgcatcccctggataatgcccgcgtagtccggggcaaagaaggcgttgaccttcacgcccagcttcttctccatatcctgcaagaacggcgtccattgcggtttcaggttttgctgactttccgtactaataatgccgaaattcaacgccttttcctgctcttcggcgtgcgccgggcttaacagggtgctgaggctgaacatgctggtgaaggccaggctggcaattatcttagcgttcattcgttttcctcaatgatggggatgtcaggcagctttcgcgttctcttcgacgcggttaatgctgcggtagagatggtcaaaacgttcgttatcaaactgttggctgctgccgtcgtagaagacgtgcccctggcgcagggcgacgatgcgttcgcagtagcgcagggcgtaatccacctgatgcagcgtgacgaccacggtgatgccgtcgttctggttgatgtcgcgcagggtgtccatcacgatgcgcgcactttctgggtccaggctggcgatgggttcatcggccagaatcactttcgcctgctgcatcagcgcacgggcaatcgccacacgttgctgctggccgccggagagggtggaaacgcgctgatgggcaaaatgcaccatgccaacgcgggtcagcgcctgtaacgcgcgctgtttctgctcgccggtgaaccagctaaaacaggtgcgccagaacggcgtgctgccgagcgcgccaatcagcacgttctccagtacgctcaggcggttcaccaggttgaattgttggaatatgtagccggtatgggcgcggcttttgcggatatcgcgggccaggcggccttcgcgctggactgtgcggcccagcagctcgatatggctaccgacagatttatcgccggtaatcaaaccgcttaagtgacgtaaaagggtggattttccggaaccgctcggcccaagcagagccaccatttcaccgtgatgaatgttcagatcaaccgcatgcagcgcctgatgctgattgaaggttttggcgagcttctcgacacggataatcgtttgcatgatgcagcctccctaaaaaagtggctccatcgtggcggattattgtgacgatttggttaattaaaagtgactaacagatgaagagttaacgggaattcgatgacagtgcgggagggcgggcctcccggcgggttattgcgttggttgttgtttgacgacattaatcatccacggtacgccaaatttatcggtgactttgccaaagccatgcgcccagaaagtttcctgccaggccatttcgatttttccgttagcggcaagattgtcaaaccagcgttttccttcttcgacctgttggctatcgagcaccagcgtaaagccggagtagctggcttttccactcggcatggcatcgctcatcatgatgtcgcttccggcaatgcgcacattggcgtgggcgatggcggtatcgggaaattgcattccggaagggcagttctcggcgctgtcctgcgcactttttggcatttcgccgaagctgattttatagagcagttccgcgcccaacgtacgttgataataggcaatcgcgtcggaacagttaccggcaaaagagaggtagggacttaacggcatgatggtgacctcagttaagagaagccagttaagtgtagttcgaaatttatacagatgagaggcggcctgataagacgcgcgagcgtcgcatcaggcagtcggcactgttgccggatgcggcgtaaacgccttatccggcctacggagggtgcgggaatttgtaggcctgataagacgcgcaagcgtcgcatcaggcagtcggcaccattgccggatgcggcgtaaacgccttatccggcctacggagggtgcgggaatttgtaggcctgataagacgcgcaagcgtcgcatcaggcagtcggcaccgttgccggatgcggcgtaaacgccttatccggcctacggatggtgcgggaatttgtaggcctgataagacgcgcaagcgtcgcatcaggcagttggcactgttgccggatgcggcgtaaacgccttatccggcctacggagggtgcgggaatttgtaggcctgataagacgcgcaagcgtcgcatcaggcagtcggcaccgttgccggatgcggcgtaaacgccttatccggcctacggagggtgcgggaatttgtaggcctgataagacgcgcaagcgtcgcatcaggcatctggcaccgttgccggatgcggcgcgagcgccttatccggcttaccgatcacaatacaatcagttctttttcacaaactcagatttcagtttcatcggaccaaaaccgtcgattttgcaatcgatgttatggtcgccttcaaccaggcggatgtttttcactttggtgccaattttcagcatgctagagctacctttcaccttcagatctttaatgatggtaacgctgtcgccgtcagccagcagattgccgttagcatctttaacgatcagctcgtcgctttcctgtgcaggttctgcgtcgttccattcgtaggcacattccgggcagatgtacatgccgttatcttcgtaggtgtattcggagttgcattttgggcagtgtggtaaactcatgtggatttcctcaaaagtcagcagggcaaaagcgccaaaaaacggcagattgccgaaaaaggccgcaattatacacaaaatccctgagtttgtcgggggtactgctgattttagacgacgatcgttttcatttgaaaggaaacgcaaaaagaaaataatctttttgcctctatttattatttaagataatgttaatgctctacttgttctttttttaattcacatgatatttttatctttctgacgttttaaacgtatcagaagacgttatttattctgataaaaaacaacacactaaatataaaattatttcttgcagtaattataaaagccgaaaacagaactcaaaaacaatctggctaaataaaataacaaaatttgctttaaggaagaattttctatgtacacacagaccctgtatgagttaagtcaggaggctgaacgcctgttacagctttctcgccaacagttgcagttactggaaaaaatgcctctctctgtacccggagacgacgcgccacaactggctttaccctggagtcagcctaatatcgccgaacgtcacgcgatgctgaataatgagttgcgtaaaatttcccgactggaaatggtgcttgcaattgtcggtaccatgaaagcagggaaaagtaccaccattaatgccattgttggtacggaggttctgcctaatcgtaatcgcccaatgactgcgctgccgacgcttattcgccatacgcccgggcaaaaggaaccggtactgcattttagtcatgtcgcgccaatcgattgtttaattcaacaattacaacagcgcctgcgtgattgcgatattaagcatctgaccgatgtgctggaaatagataaagatatgcgtgcgcttatgcagcggatcgaaaatggcgtcgctttcgaaaaatattatctgggtgcccagcctatttttcattgtctgaaaagtttgaatgatttagtgcgactggcgaaggcgctggacgtcgattttcctttttctgcttacgccgccattgagcatattcccgtgattgaagtggagtttgtccatctagcggggctggagagttatcccggtcagttgacgttactggatacccccgggccaaatgaagccgggcaaccgcatctgcaaaaaatgcttaaccagcagctggcacgcgccagcgcggtactggcggtgctggattatacgcaactgaaaagcatctccgatgaagaggtccgtgaggcgattttggcggtggggcaaagcgtgccgctgtacgtgctggtcaataagttcgatcaacaggatcgtaacagtgacgacgccgaccaggtgcgggcactgatttccgggacgctgatgaaagactgtattacgccacagcagatatttccggtgagcagcatgtggggctacctggcgaatcgggcgcgctatgagttagccaacaacggtaagttaccaccgccagagcaacaacgctgggtggaagattttgcccatgccgcgcttggcaggcgctggcgtcatgccgatctggcggacctcgaacatattcgtcatgctgccgatcagttgtgggaagatagcctgttcgcccagccaattcaggcgttgcttcatgccgcttacgctaacgccagcttgtatgctctgcgatctgccgcgcataaactgttgaattacgcgcagcaggcgcgggaatacctggattttcgtgcgcacgggttaaacgtcgcttgtgaacaattgcggcaaaatatccaccagatcgaagaaagtttgcagctattgcaactcaatcaggcgcaggtgagcggcgagattaaacatgaaatcgagctggccctgacctccgccaaccactttctgcgtcaacagcaagatgcgctgaaggtgcagttagccgccttgtttcaggatgatagcgagccgttaagcgagattcgtacccgctgtgagacactgttacagacggcgcagaacaccatcagtcgcgactttacgctgcgttttgccgagcttgaatccaccctttgccgggtgttaaccgatgttattcgccccattgagcaacaagtcaaaatggaattgagcgagagtgggtttcgtcctgggtttcattttcctgtttttcacggcgtagttccccacttcaacactcgccagctgttcagtgaagtcattagccgccaggaagcaacggacgagcagagcacgcgtttaggcgttgtgcgtgagacttttagccgctggttgaatcagcccgactggggacggggaaatgagaaaagtccgacagaaacggttgattacagtgtgttgcaacgagcattaagcgcagaagtcgatctctattgccaacaaatggctaaagttctggcagagcaggtcgatgaatctgttacggcaggcatgaatacttttttcgctgagttcgctagttgtttgacggaattacagacgcgtttacgcgaaagtctggctctgcgtcaacaaaatgaaagcgtggtcaggctgatgcagcagcaattgcagcagactgtgatgactcacggctggatttacaccgacgcccagctgttacgcgatgatattcaaacacttttcacggcagaacgatattgaccaagacgttacttgacggccccggtcgcgtgctggagagcgtttatccccgctttttagtggatctggcgcagggtgatgatgcccgccttccacaagcccatcagcagcagtttcgtgaacgactgatgcaggaacttcttagccgtgtgcagcttcagacatggacgaacggcggcatgttaaatgcgccgcttagcctgcgtctgacattggtggaaaaactggcgagcatgctggatcccggtcatctggcactgacgcagatcgcgcagcatctggcgctgctgcaaaaaatggatcaccgccagcactctgctttcccggagctcccccagcaaattgccgccttgtatgagtggtttagtgcccgttgtcgctggaaggaaaaggcgttaacgcaacgaggcctactggtgcaggcaggtgatcagagcgagcaaatttttacccgctggcgtgctggggcgtataacgcctggagcttgcctgggcgctgttttatcgttctggaggagttgcgctggggggcatttggcgatgcctgccgtctgggaagcccgcaagcggtggcgttgttgctgggtgatttgctcgagaaagcgacacaacatctggcagagagtatcaatgcggcaccgaccacgcgtcactattaccatcagtggtttgcctctagcaccgttccgacgggcggggagcatgctgattttttaagttggctgggaaagtggaccacggcagataaacaacccgtttgctggagtgtgacccaacgctggcaaactgtcgcgctggggatgccacgactctgtagtgcgcagcgtctggcgggggcaatgctcgaggaaatcttctctgtaaatttggcgtaaataatcagttacatcaatgagtcctaaacgaaatccatgtgtgaagttgatcacaaatttaaacactggtagggtaaaaaggtcattaactgcccaattcaggcgtcaactggtttgattgtacattccttaaccggagggtgtaagcaaacccgctacgcttgttacagagattgcatcctgcaattcccgctccccttttgcggccgtcgcgctgatttttctggcgtttgcggaaatgggccaactctgcgaggaaagctatgctgaaaaggaaaaaagtaaaaccgattacccttcgtgatgtcaccattattgatgacggtaaactgcgtaaagccattaccgcagcaagtctgggtaatgcaatggaatggttcgattttggtgtttatggttttgttgcttacgcattaggtaaagtttttttcccgggggctgaccccagcgtgcagatggttgctgcacttgccactttctccgttccctttctgattcgaccgcttggcggactcttctttggtatgttgggcgataaatatggtcgccagaagatcctcgctatcactattgtgattatgagcatcagtacgttctgtattggcttaataccgtcctacgacacgattggtatttgggcaccgattctgctgttgatctgtaagatggcacaaggtttcagcgtcggcggtgaatataccggggcgagcatatttgttgcggaatactcccctgaccgtaaacgtggctttatgggcagctggctggacttcggttctattgccgggtttgtgctgggtgcgggcgtggtggtgttaattagcaccattgtcggcgaagcgaacttcctcgattggggctggcgtattccgttctttatcgctctgccgttagggattatcgggctttacctgcgccatgcgctggaagagactccggcgttccagcagcatgtcgataaactggaacagggcgaccgtgaaggtttgcaggatggcccgaaagtcagctttaaagagattgccactaaatactggcgcagcctgttgacatgtattggtctggtaattgccaccaacgtgacttactacatgttgctgacctatatgccgagttatttgagccataacctgcattactccgaagaccacggggtgctgattattatcgccattatgatcggtatgctgtttgtccagccggtgatgggcttgctgagtgaccgttttggccgtcgtccgtttgtgctacttggtagtgttgccctgtttgtgttggcgatcccggcgtttattctgattaacagtaacgtcatcggcctgatttttgccgggttactgatgctggcggtgatccttaactgctttacgggcgttatggcttctaccttgccagcgatgttcccgacgcatatccgttacagcgcgctggcggcggcatttaatattagcgtgctggttgccggtctgacgccaacgctggcggcctggctggtcgaaagcagccagaatctgatgatgcctgcctattacctgatggtagtggcggtggttggtttaatcaccggcgtaaccatgaaagagacggcaaatcgtccgttgaaaggtgcgacaccggcggcgagtgatatacaggaagcgaaggaaattctcgtcgagcattacgataatatcgagcagaaaatcgatgatattgaccacgagattgccgatttgcaggcgaaacgtacccgcctggtgcagcaacatccgcgaattgatgaataagctgaaacggatggcctgatgtgacgctgtcttatcaggccaattgaactcttaaggttcacttaatctctgacgcgcatactctcctccaggttaacggaggagagtgcaatgaaaaaccgtgtttatgaaagtttaactaccgtgttcagcgtgctggtggtcagcagctttctttatatctggtttgccacgtactgatctttcttcagccgtacccaggcccgcgtgccggaagtctcttgccggttttgcaggaaaaactgcccgtgatgcaactgtgtaatgcggctgacaatacttaaccccagaccaatcccgccataacggctgtccatacgtacaaacgctttactcaactccccgcatttactctcatcaatacctggtccttcatcttcaactgccatgaccgctccgtcatcttcttgcagcttaatcataatgttgctgccttgcgggctgtaacgatgggcgttttctaccaggtttcgcaataacatccgcagcagggttgcatcaccctgaacggtgatgtcggcggcgctctctggcaatagcagggtttgctgtcgctggtcgagcatggtactgagttcgtcatagctggggagaatgacatcttccagcagttttacatgttgataattaccggaagaaaaactctgtccggcacgcgccagttgcagcagctgggagacgctctccatcatctgatcaagccgtgccactaacggtgctacatcaatgtgatgcgttttcgccagcagttccagatgcaaacgcacccccgccagtggcgttcgcagttcgtgcgcgacgtcagcggtaaacaacctttcgttatccagcgtgctggtcaggcgactgaccagatcgtttaacgcgctaaccaccgcttcgatttcgagggtggcgctgtgaatggcaatgggcgttaagttgtcggcggtgcgcgcttccagctctttttgcagctccgccagcgggcgggtgatgcggcgtaccgcctgatagcagataaatagcgtcaggctgaccataaagacgccggggacaatcaggctggcgaccgcctcgcggatctcacgcatgatgtggcgatcgttgttgcgattgtcgcgtagcgcctgctcaaacagctgaatctgctcggtactttcatgccatagccagaagacgctgatcagctcaaacaccaacaaaatggccccgatggtcaatatcagccgttggcgcaggcttattggtcggcgcagaaaatgcatcagattcaattagttttcctcattcgcgaccagcatatagccaaagccgcgcacggtgcggatacgggctttgcccactttgtcgcgcagattgtggatatgcacttccagggtgttggtgctgggttcattgtcccagttatagatgtcgttgtagagaatttcccgatgcaccggactgcctgctttgagcattaaccgactcagcagagcatattctttgggcgtcagaatcaactcttcaccgcccatccatacctgacggcgacccatgttcagcgtcagattgccaacaatcagctcactttcgccctgattattatggcgtcgtagcagggcgcggatacgggcatgtaactcttccagcgcaaaaggcttcaccagatagtcgtcggcaccgacatccagcccggcgattttgtcggtcagcgtatcgcgagcggtgaggatcagtaccggcagggtatattttttctgccggatacgggcgagaaaatgcagtccatcttcgtcgggtaaccctaaatccagtaccaccaggctgtaatgacctgcctcaaggctttgttccgccatccgcgcggttgtcacgctatcgcacgcgtagccttcggtttgcgccgccagaatcagtccctgcaataacagcgtatcgtcttcaacaatcagaattttcattcactcactctcctgcaagtttgcagaatatcatccgcagcctggtaatacttcgtctcaacgccagttaatcccaatagcgtggagaataaattgtcttgactatagtgttgcgtttgcgcctgtttttgcaggcagttctggtcaacctgataccgtttttgataatcctcgctcagccacagcagcatcggcacctgtttttggctatccggggcgatggcataaggcagaccgtgcagatagatgccattttcacctaagctttcaccgtggtcagaaagataaaccaggctggtggtaaatttatcctgatgttctttcagcagattaatcgctttatcaacaatatagtcgacgtaaaccagcgtgttgtcgtaagtgttcaccagttgctctttggtacaggtctggatctcattggtgtcgcaggttggggtaaatttcctgaactgaggcggatagcggttgtaataggtcggaccgtggctgccgatggtgtgtaagacaatcacgccatcaccttgcaggttattgatgtactcttcaagcccgtggaacagcacttcgtcatagcattcgccgttgatgcactgatcaggtagattcagcgcggtgacgttctggtgaggcacgcggtcgcaggcacctttacagccgccatcgttgtcattccacagcacgttgatgcccgctcgctgaatgatatccagcacgccttcctggtgctgtgccagctcttctttgtagtgctcacgcggcatatcgctgaacatgcacggtacactaactgccgttgccgtgccgcaagatgcggtattagggaaatagaccacgttatctttcgccagccgcgggttagtttcacgcgggtagccgttgagggagaagttctccgcccggctggtttcgccgacaatcaggatggtcaaatttttacgtttttcgttctgcattaacgggttgcggtgcgcgtcttcaccaattcgcaccagcggcagatttgccagtcgctgatgggagtaccaactccagctggcaacaatgctgttagaggggcttaaggatttcaccagctctttgttattgcggaacaagctggcgtagtctttataaaacagtgcggcgaccagcaaaatcagtagtacagaaaccagaatattggctccacggaaaagaacactgcgcagacggctggtggcaggtttgatttttatccagcaggcaatcagcgcagcaagcacgccgctgaatcccagcgttaataacatttgcggtgtcatcagcgcataactttctgccggagtggtatcaataatattggcaatcatgctgcggtcgatgacgatgccgtaagtcattatgaaatattgtgcagccgcgccaaccagaataaacaggcaggccagtggtcgattaagccataagaaagagcttagtgtcaggacaatattaatcacgctgaaagcgacgaccggcatgctcaagaaaaccagtacgttatgcaggctatccagcggcagcgcctgcaacacctgtttaaaaaaggcaatattcaggcagatagagatataaaaagcggccaacaatagccaggcgagtaaattcaaagagggtctttttagtaggcgcttcaacatcacggtgtttccatcgaacaaagtgcgcatatgctcgcaaagcaaaattaagccaaccttaagttcttaaggttggcttttatgtttgctggattaaggggaattaatctttgcttattggtgcatctaagggatacgggtttttatgtagccggttgtaattcagcgcatacatggcggtgatgaccatcagggtgacaaaactccacataacctctttcgctccggaccccaccacggcccagatgcagtagaggaaggcaatggtagtaactgccagatatgccgggcgtgctttaccaaagtgaccgtgtccgagcagcagtaacgccgcacaggtgtaaagatatggcaccagtgtaaagatgacgctgacggaagaaaccagaccgaactctttggtcgcgtttggactaatgctgctgagctggaagatggtcatcaaaataccgacgataatcagccccgccactggcgtacccgctttatttacacgggcaaaaatcggtgggaacagtccgtcatcggcagcggctttcgccgtttgacccgccagcaacgtccagccgcccagactacctaagcaacccgcagctgcgcagaaggaaacaatggccccggcggtgtcacccaacgccatccgtgcggcatcaccgaatgggctagcagaaacgcgcagtgcggcattagggatcatccccataatcgcggtggtagaaagtacatagcaaacggcggcaatcaataccccaccaatggtggcgatagggacattgcgtttcgggtttttcaccacacctgcggcaacggaggcactttccacaccgatgaagctccacagcgtaacgttaagggtactttgaattgcaccgaaggtgcccaggccgctgacgttccatgccgccatataggtttcaccacggaaccagaaccagccaaatacggcaatcccgacgatggggatcagcgccagcacggtggcaactgcctgcacacgggtgatcattttcggaccgacaatgttcagcaggacgaagatccacagcaccacgacgcaggtgatggttaataccaatggatctttcagaatcgggaagaagtaacttaaatatcctacgccaatgaccaccatggcgatattgccgatccagcaggccagccagtagaggacgttggtttgataaccgagaaacgggccaaagcagcggcgggcgtaagcgtaagaaccaccaggacttgggtcgaggaagctcattttggcgtataccatgctgagccccagtgcaccgataatcgtcaccaaccatccataaatggcaatcccgccagtagaggccaggtttgcaggtaacagaaaaacaccactccccataatattcccgctcaccatcagggtgacggggattaagcccactttgtgagcatcagcatcgctagacataattaaactcctgcgaaggcgagcttcgtgacaataaattacgtcatatcatacgcctgcattcgatagttgaattattatcgaccgggttatcgctgatgccgttattaatatagctcttcgttaaggttaaaaatcaggcgacagtgcgttctctgtgctgactaacataatgcagcggcgtcataccgtagaagtctttaaagacagaaataaagtagctcgtactgttgtagccgcaggactgacttacctgagagatatttttaccgtccatcattaattcatttacggcataacgcatgcggcaggtggtgattatttggctataactggtgttttcgcttttcaactttttctttaacagacttgggctaagacataaacaactggctaccatactaagattccagtctttgtgaatatcgctttcaataatttgataaacgctgtcacttacacaattacgtaacatatacatcattaaactaacgaattttttactgtcgagaaaacgggatagcaccgtgaataataatgcgcgtgttcgttccttttcactctcagtttctgcgggcatcatgctgtgttgcgcggcaacgcgaaagacgtctggcgtcaggcatggcagggtgagtatgggcgtagcgctacgttgccatactggtatttggctgagatctttattcagaaaccggaggtaatctttgatgatgtcgtgactaatatgagcaaccaaagtgttgttaagagaggagacgtcgataatattattttcacaatttaataacgccatatggttagctttaaggctaataggttctttcccattcacccttatccagacatctttttcagtcaataaaacaatacaaggttggtcgctgcaaatcctcatacatgtactcctgagtgcgaataaaagaccagttctcgctaaagcaaagcgataccgggaaatggttatataattgtatgatgaatataaacatgcataaaaataacgagttttactaatagtacaaatttttatagtaatttctcatgtacatatttttttacaggataaataacaggcaaaaaaaagcgcggggtggggccgcgcaaaaagtatgacatttttgtttgcagcaatttttatgaaaacgttgccatactcaaaaggcctaaggccaggcggcgtaatgttatttaaacaattacgccttcagcggaatagtggttacgctttcacgcacataacgtggtaaataccgtcaataatttcagtcccttcagtttcgtgttcaaatccagggaaatggtggtcccaggattgcaggctgcgtaaataacttacttgcggactgtttttatcgccgaagttttcaccagacagcagcatcgggattcctggcggatacgggataacactgtttgccgcgatgcgtcctggcagattttcaatggataccagttcgacattgttgtcgacaatcgcgttgtacgcttcacgcggggtgacttccgccaccggcaggccggaataggcttcgttcaaccgtgcgccagggttgttttctttcagccaggcaaacatggtgtcacccagatcgtgaatccccatgttcgcgtaagtgtcaggatattgttcaacaagttccggcatcacctgcgccagcggtgtgttggcgtcatagtggcgtttgaaggagcaaagggtgttaaccagagttccccatttcccacgggttacgcccatagagaacaggaacataatttggaagtcagtggtgcgggtaggtacaatgccgtggcgaccaagccaggcagtgaccagcgccgccggaacaccggtttcttccagttcaccatcttcacccattcccggagcaaggatgctgactttaatcgggtcgagcatactccagttatccggaatatctttgaagccgtgccagctttcgcccggatgcattacccagcagtcctgaacggtggtcagcagtttggttggtgcgtcagcaaagtcataggttttgccggtttgtgggtcggtgacgacttctttgttccacggtttgaagaaccagctaccgtcagcggtgaactctttatatagccgcgccatcgcctgacggaaatcaaccgcttcgtcaatcacttcctgtgtcagactcaggccgctgttgccgtccatcatgctcaccgccacgtcgttggatgcgcagatggcatacagcggggaggtggtggcatgcatcatgtaggcctggttgaagcgggagaagttaatcgccccacgaccttcacgtacatgaatataagaagcctgactcagcgcattcagcagtttgtgggtggagtgggtggcgaaaacggtaggaccgttgtgatcgccaggttcgccgcgcatggcatagtgatcggcatagatcgggttgaaacgtgcatagccgtaccaggcttcgtcaaagtgcagacgatcggaggttttttccagcagatcctgcgcttctttagcgttataacacacgccgtcataggtgcagttggtcaccacgcagtaagacggtttttgcccggctttgtctttggtcagcgggctttcactgattttcttctgcaaggtttcaggttgcatttcctgcggatagattggcccgataatgccgtagcggttgcggcttggcaccatatagaccggtttcgcgcctgtcagcatcaaaccttgttcgatggatttatggcagttacggtcaacgaccacgacatcgttatcggtcatgcaagcctgcatgatggtgcggttagagccggaagtaccgacgactacgctccaggagcgatcggcaccaaatacgcgtgcggcatatttttcgctttcgccaaatgcgccagtatggtcaagcaaagaaccgagggaagttcgttcgatgcccatgtcggtgcggaacagattttcaccatagtagtcatggtagaaacgtccggcgggtgttttggtaaaaccaacgccgccctggtggcctggcgctgcccaggaatattcatggatgtcactatatttcatcagcgcgctgaacagtggcggcaacagctgctggcggtagcgggtcatcgcggcaacggcgcgtccggcgataaagtcggcggtatcttccagaatccaggcgaattcatcgacaagctccagcaggtcgcgatccattgcggcgagggctttttcccgatcgcccaacaggaagaccggcacgttttgttggcgctcatgaagcttaccgatcaattgtctgacgttttgatgttcgtccggatgttccatttgatagctgaacatcaggcagtcaatggcttcgttactagagagaatggcaaaaccatcatcaaaggaggtggatttaatcacggtaacattttgctggcttaaagcatctgccagacgctcaacggcgttaccgacccaggtgtcttgatggagaaactcgctttcaacaattaatactttcatcattgcttacccggttatgaaggaatcttcgttgcgggcaagtatcttccggccttttcgggctgtaaagcgcgtgaaaaacaaacatttttgaaatatttagttttataaacaatacgttatgtgattattttaaattattttcactgcttattatcgacggctaaactatttttttggctgatactgatatcgtctttagccgggaaacgtctggcggcgctgttggctaagtttgcggtattgttgcgggctcatgccgacatatttgccgaacgtgctgtaaaaacgactactactacgaaagcctgccgtcagggcaatatcgagaatacttttatcggtatcgctcagtaacgcgcgaacgtggttgatgcgcatcgcggtaatgtactgtttcatcgtcaattgcatgacccgctggaatatccccattgcatagttggcgttaagtttgacgtgctcagccacatcgttgatggtcagcgcctgatcatagttttcggcaataaagcccagcatctggctaacataaaattgcgcatggcggctgacgctgtttttgtgtgtgcggctggttttattgaccagaatcggttcccagccagagaggctaaatcgcttgagcatcaggccaatttcatcaatggcgagctggcgaatttgctcgttcggactgtttaattcctgctgccagcggcgcacttcaaacgggctaagttgctgtgtggccagacttttgatcaccatgccgtgagtgacgtggttaatcaggtctttatccagcggccaggagagaaacagatgcatcggcagattaaaaatcgccatgctctgacaggttccggtatctgttagttggtgcggtgtacaggcccagaacagcgtgatatgaccctgattgatattcactttttcattgttgatcaggtattccacatcgccatcgaaaggcacattcacttcgacctgaccatgccagtggctggtgggcatgatatgcggtgcgcgaaactcaatctccatccgctggtattcgctatacaggctcagcgggctgcgggtctgtttttcgtcgctgctgcacataaacgtatctgtattcatggatggctctctttcctggaatatcagaattatggcaggagtgagggaggatgactgcgagtgggagcacggttttcaccctcttcccagaggggcgaggggactctccgagtatcatgaggccgaaaactctgcttttcaggtaatttattcccataaactcagatttactgctgcttcacgcaggatctgagtttatgggaatgctcaacctggaagccggaggttttctgcagattcgcctgccatgatgaagttattcaagcaagccaggagatctgcatgatgtctgcacccaaaattacatttatcggcgctggtagcacgattttcgttaaaaatattcttggtgatgtgttccatcgcgaggcgctgaaaacggcgcatattgccctgatggacattgaccccacccgcctggaagagagccatattgtggtgcgtaagctgatggatagtgcaggggccagcggcaaaatcacctgccacacccaacagaaagaagccttagaggatgccgattttgtcgtggtggcatttcagattggcggttatgaaccttgcacggtgactgatttcgaggtctgtaagcggcatggtctggaacaaaccattgccgatacgttggggccgggcggtattatgcgcgcgctacgtaccattccgcatctgtggcaaatttgcgaggacatgacggaagtctgccccgatgccaccatgctcaactatgttaacccaatggcgatgaatacctgggcgatgtatgcccgctatccgcatatcaaacaggtcgggctgtgccatagcgtgcagggaacggcggaagagttggcgcgtgacctcaatatcgacccagctacgctgcgttaccgttgcgcaggtatcaaccatatggcgttttacctggagctggagcgcaaaaccgccgacggcagttatgtgaatctctacccggaactgctggcggcttatgaagcagggcaggcaccgaagccgaatattcatggcaatactcgctgccagaatattgtgcgctacgaaatgttcaaaaagctgggctatttcgtcacggaaagcagtgaacattttgctgagtacacaccgtggtttattaagccaggtcgtgaggatttgattgagcgttataaagtaccgctggatgagtacccgaaacgctgcgtcgagcagctggcgaactggcataaagagctggaggagtataaaaaagcctcccggattgatattaaaccgagtcgggaatatgccagcacaatcatgaacgctatctggactggcgagccgagtgtgatttacggcaacgtccgtaacgatggtttgattgataacctgccacaaggatgttgcgtggaagtagcctgtctggttgatgctaatggcattcagccgaccaaagtcggtacgctacctagccatctggccgccctgatgcaaaccaacatcaacgtacagacgctgctgaccgaagctattcttacggaaaatcgcgaccgtgtttaccacgccgcgatgatggacccgcatactgccgccgtgctgggcattgacgaaatatatgctcttgttgacgacctgattgccgcccacggcgactggctgccaggctggttgcaccgttaaaacgcgactaaacgctactgcgccgggggatttattccggcgcacacctctgacgataccaataacagaaggcgggcgttggtaacagcgacccgataccctatgagcatttcaatgactacaaaactcagttatggatttggagcgttcgggaaggattttgcgatcggcattgtgtatatgtacctcatgtattactacaccgatgtcgtcgggctgtctgtgggtttggtcggtactttgtttctggtggcgaggatctgggatgctattaacgatccgattatgggatggattgtaaatgctacgcgaagccgatggggtaagttcaaaccctggatcctgatcggtacgttggcaaactctgtaatcttatttctcctctttagtgcgcatctgtttgaaggtactactcagattgtctttgtttgcgtgacctacatcctctggggcatgacttacaccattatggatattcccttctggagcctggttccaaccatcacgctcgataaacgtgagcgcgaacaactggttccttatccgcgtttttttgccagtctggcaggctttgttacggcaggtgtgacgctaccatttgttaattatgtcggcggtggcgatcggggatttggctttcagatgttcactctggtactgatcgccttttttattgttagtaccatcatcactctgcgcaatgtgcatgaagtctttagcagtgacaatcaaccgtctgctgaaggaagccatctgacacttaaagccatcgttgcgctaatttataaaaacgatcagcttagttgcctcttgggtatggctcttgcttataatgtagccagcaacattattaccggctttgctatctattatttcagttatgttatcggtgatgcggatttgttcccctattatctgagctatgcgggagctgctaacctggtgacgttagtattcttcccacgcttagttaaaagtttatcccgacgcattttatgggccggagcatctattcttccggtgttaagctgtggtgttctcctgttaatggcattaatgagctatcacaacgtcgtcctcattgtgattgcgggtattttgctgaatgtgggaacggcgcttttctgggtattacaggtcatcatggtggcagatatcgttgattacggtgaatataaactgcacgtacgctgtgaaagtatcgcttactccgtgcagactatggtggtgaagggcggtagtgcctttgcggcttttttcattgcggttgtgttagggatgattggctatgtaccgaatgttgaacagtctacgcaagccctattaggtatgcagtttattatgattgctctaccaactctgtttttcatggtaacgctgattctctacttccgtttctatcgcctcaatggtgacacgctgcgcaggatccagatccatctgctggataaatatcgcaaagtaccgcccgagcctgttcatgctgatattccggtcggtgcagtgagtgatgtgaaagcctgacgtggacaatagctaacgaaaatggcctgatgcgatatgtttatcaggccacgtcttaatgtaatgctttggatttgcaaattttgtagaccggataaggaattcacgccgcatccggcatcaacaaagcgcaagttgttatccggttatcaagccaaagcgccgtagctggcggcaatgaaagcgagcgaggaatatcaccgtcgttaatgcgccaagcagcgcgcagaacatatcggattgcgtgtcccactggtcgccctgggtgccgagaaaatcatccgctccctgacccattgccagcgctgcccaccactcgattaattcatacatcgcgcttatcgccagcgccacgcagcagaccaggaacgccaccattttacgtccgcgcacgtacatcccgcgaacgagaatttctcgtgccaccagtgcaggcaccagcccctggaaaaagtgccccagcttgtcatacggattacgactcaaccccagccattcctgcacctcaaaaccaacggggactttcgcgtaggtgtattgtccgccgaccatcaggatgatggcgtgaaggaaaatgagcgtatagagcagcggcgttaacggataacgtctggcggtggcaagcagtagctgcacgacaataatcaccggtgtcacttccatcagccaggtgagtttgtcatgggcgctaatgccggtataaatcaggattaacgttagcgtcagtgcgctggtgttaagaattaacggcttgagtgtgcgggtcatggtgagttcgcaaatcagggaaaatactgactattcaccagcaagcgtgaaattacaatcgcaaaagaggtggccagggggatcacctggcagcatgctgccaggcgctgggccgaagaggttacttagtgcagttcgcgcactgtttgttgacgatttgctggaagaagtcgttacctttgtcatcgaccaggataaacgccgggaaatcttctacttcgattttccagatagcttccatacccagctccggataagcgacgcactccagatgcttgatgctctgctgcgccagtaccgccgccggaccgccgatgctaccgaggtagaagccgccgtgtttatgacacgcgtcggtaacctgctgactgcggttacctttcgccagcatgatcatgctgccgccgtgggattgcagcagatccacgtaggagtccatacggcctgcggtggttgggccaagactaccacttggataaccggcaggggttttcgccggacccgcgtagtagatcgggtgatctttgatgtactgcggaagttctttaccggcgtcaatcagctctttcagcttggcgtgtgcaatatctcggcccacgataatggtgccggtgaggctcaaacgagtggataccgggtattggctaagctgggcgaggatctctttcatcgggcggttaaggtcaactttcaccgcttcgccttcaccggcctggcgcagttcttgtggaatgtactggcctgggttgtgttccagtttttcgatccagataccttcgcggttgattttcgctttaatgttacggtcagcggagcaggagacgcccatgccgaccgggcaggatgcgccgtgacgtggcagacggataacgcgaatgtcgtgcgcgaagtatttaccgccaaactgcgcgccaagaccgagtttctgggcctcttccagcagttcctgttccagctggacatcgcggaacgcctgaccatgttcgttcccttccgtcggcagttcatcgtaatagtgagcgcttgctaacttgacggttttcaggttggtttccgcagacgtaccgccaatcacaaacgcgatatggtacggcgggcaggctgcagtaccgagggtacgcattttctcgacgaggaagtttttcagtttgccgggagtcagcagggctttggtttcctggtagagatacgttttgttggcagagccgccgcctttcgcaacgcaaaggaatttgtactcatcgccatctaccgcgtacaggtcgatttgcgcaggcaggttagtgccggtgttgacctctttgtacatgtccagcgccgcattctgactatagcgcaggttatcttcgatataggtgttatagacgcctttgctcagcgtttcttcatcaccgccgccggtccacacgcgctggccttttttaccgacgatgatcgcggtgccggtatcctggcaggtcggcagcacgcctttggcggcgatttcggagtttcttaagaattgcagcgccacgtacttgtcgttttcgctggcttctggatcgtgaagaatagccgcaacctgtttctggtgtgccgggcggagcataaaagaagcgtcgtgaaaggcttgctgcgccagcagggtcagggcttctggttccactttcaggatggtttcgccgtcgaagtcggcaacgctaacgtaatcggaagtgagtagatagtattcggtattgtctttccccatcgggaaaggtgcctggtagataaagggtttgttactcatagcttccagcctgtaactctgtatttgttattcgaaaatggcgtgccgcgtagtcacgggcggcacgcaaagtgcatttataagaacccgtacatcgcggcgaagatccagccgaagacgcagcttacgctcacaccaatcaaccccggcagaataaagctgtggttgatgacgaagcgaccgatgtgggtggtgccggaacggtcaaactgaatcgctgccagatcgctcggataagtcggcaggatgtaataaccgtagcaagccggtgcactagccacgatgtatgccggatcaacgccgatcgccagcgcgaccggaacaatcgccgccagcgccgcagcctgagagtttacaaacttggaaaccagcagcagaacaatggcataggcccacggatactctttcaccatttcacccagtacgccctgaatttcagacatatgcgcaccgaacatggtttctgccatccatgcgataccgtacaccgccacgatggcgatcataccggaacggaagacttcgtttttactgatagacgcgggattggttttggtcaggataataatcagcgccccggtcagcagcataaacatctgaataaccagtaccatgctcagcggtttgccgccgaaggatggacgcaggtcgctatcagcaccaagaagggcgactacagcgattgccccgaggaaaatccacattgccagccagttgcttttcggcagttttttatccagcagcgtcgcggtatcaccgtaaacatactcacggttttccggtacggagatgaatttctggaactcttcgtctttatccagatctttaccgcggaaccagctgaagataccgatcgccaggataccgattaacgtgcttggaatggtgattgccagcagatcgaggaactcaagatggcgaccatcaaaggtgacattacccagcatcgcaaccagagacacgaccgcaacgctcaccggactggcgataatccccatctgtgcaccgatagaacttgccgccatcggacgttccggacggatgttgttcttaatggcgacgtcgtagatgatcggcagaatggtgtaaaccacatgacccgtaccgcaaagaatggtcagtgtacaggtcacaaacggcgcgacaatactgacatatttcgggttgcggcgcagcagcttctcggcaatttgcagcatgacatcaagaccgccgctagcttgcaaggtcgcgcttgccgccaccaccgcaatgataaccagcatgacatcaactggtggtttacctggctgaaggtggaagacgaagaccagaatgaccagaccgataccgcctaataaacccagcgcgataccaccctttctggcaccataaaacagacatatcagtattatgataagttggatagtaaataacatgtgtgaaccctcgcgataatcctatttaaatttttgctgaatagatcacagtcacgttctgttttgtatgaactgttttcagagcctgactaaatatccgtttggtcgttaccggctttagcaaatacctcacagtgaatattggctgattaaagcagcggcaaatttatgcactgtgataagcggctttttcagagagaaagactctctggcgatgggtttatagtttgtactgcgcagatgttaatgttttgtttgctgttatcttattgatatttatcggtctattttttgttctcagggcagatgtcattaggtttatagattaatctgatctacccatttgtgggtaaaaatacacataatgcgggtgacataatagttaattaacttttgttagcgttttgaaattaaaaacaccgttcacctgaagagatattaatttttagcgatgatggagggataattatatttgatctggcacaagttttactgatgaaggatgtaacttgtgccaggggtattttgcattacggtaataattattacttacagataaccagcgatccgttattggcaatattgtttcagtagactgtagtgttctgcctgaatacggtaacggtaaactggacgccccgtgacgccataatggatactggtgaacaagatgtggcagttgaccagccagatgaggtatttacggcaggaaacacggctaatgttaacctcgttggctagctcgtcggtactaaattcatagtcctggtgcgcgtcaatccactggcacagtgtgcgtaacgtctgcggcgttaagccttttggcaagcgacgaggatcctgttcgttggagctgctgccgtggattagctgatcaagctcggcctggtcataatactgatgtttttccagcgccattttcttttgccgccagccggtgagcgcctcttcaaagcgggaagcctggaagggtttgatcaggtaatccacgacaccgtaatgcaggctatctttaatggttgccgcatcggctgcggaggagatgacaatcacatcacttttgcaacgcgcgttatgcaggacaggcagtaaatcgagcccgttctctttttgcatatagatatcgagcaatatcaggtcgataggcgtatcgctattgaagataatctctttggctttctccagcgtgctggctgttccacagcattgaaagcctgggatttgtgctacgtatcggcgattcagctccgcgaccattgcgtcgtcatcgataattaatacattgatcatctgttgctcctctccccgtcccagggtatctggacaaaaaattgtgtgaaaatcccgggttcgctttccacggcgatgctgccgccgagattttctacctgttgtttgacaagtgctaaaccgacgcctcgctcgcttccttttgtgctgacacctttgtcaaaaatgtgatcgattttatcgggtgcgatccccggtccatcatcattaacttcacagtgcagccagccgtgacggtagtgcaatgttacgctaatttcgcctccgggttccggccctaatgcctccagcgcgttttctatcagatttcccaacgtggtaatcagcgtcgcgacctggtcctcactgccgctgtctggcagctggctttcactgtttaaaatcagcgtatggcctaaatcggtcgcgcggttaatcttgctgattaaaaaaccagcgataaccggagatttgatcttacccagcagagagccaatctcttcctgatagttattggctgttttgagaatgtaatcttccaactgcttataactcttcagatgcaataatccgagaatcacatgcaatttattcataaattcgtgggatcgttcacgaagtgcgtcagcatagttgaccagaccgtcgagtcgctgcatcagtttacgtacttcagttttgtccctgaaggtactaatggcaccgatgataacgccattactgcgcaccggaacggtgttgatcagtaatagccggtctttaatcgtaatctcttcgtcgcggcgcggggtaccgtcgcgtaacacttcgctgacatctaccacctgactccaactgtggcttagcgtgctcagtttctcatcgtcctggctcttacggtaattcagcaattcttgtgcggcatcgttgatcagcgtgacctcgccgcgatcgtccacggcaacgacgccttctttgatagactgcaacatggcctggcgttgctcaaacagcgtggagatttcgtagggttccaggccgaaaaggatttttttcagtaccttaaccagaatgcaggtgccaatcagtccgaccagcatgccaaataatacgctccagataatgctccagcgactgtcattgatctgttgggtcacacggcttaactcaaggccgatcgccaccacgccaatttgtttatgattttcatcgtagatgggggtaaatacgcgtaaagcctgcgccagaaaaccgcgattgatagcgacattttcttcgccattcagcgctttaaggatgtcatcacctttaaatggctgaccaatacgctgggcttcaggatggctgtagcgaagactttgcatatcggtaacgacaataaacagcagatcgttgcgtttgcgtacggcttccgcgatggcctggatgccactctcctgcggttttttctgcaagccctgacggatttccgggctgtcggcgagggtacgcgccactgccagtgccttgttggctagcccatctcgcgtcatatcactgatttggctgaagtaaatcagatgcaccaccaatagcacgctgaacagtaccgcactgaccattaagatcactgtggtactcaatttcatcggacgtttgcgtaacatgcggtagggcaaactatgtctcatcagcttccttgtgtgacaaatttcttaagcattatctctgatgaggcgggtaattcaaagggagtaagaatgattggctatataggggaagagactctggcaacggaaactgccagtgctgtatgaagattccggggctatgcttatagcgataatcatactgatgagagagggaaggtcatggatcaggcgctactggacgggggttatcgctgttataccggcgaaaagatcgatgtctatttcaacactgcgatatgtcagcattctggcaattgcgtacgtggcaacggcaagttatttaatctcaaacgaaagccgtggatcatgccggatgaagtcgacgtcgccactgtggttaaagtgattgatacgtgcccgagcggcgcgctgaaataccgtcataaataagcgagggtaaaatggaaatacgcgaaggccacaataaattttacattaatgacaaacaaggcaagcaaatcgctgaaattgtctttgtgccgaccggagagaatttagcgattatcgaacataccgatgtcgatgaaagcctgaaagggcaagggattggtaaacagctggttgcgaaagtcgtggaaaaaatgcgtcgggaaaaacgaaaaattatcccattatgcccatttgcgaaacatgaatttgataaaacgcgggagtatgatgatattcgcagttgatgggagagtacagagtcacgatatttttcattctctccgcgatgtgatgcaggagagcatctgaagggtagggggatgcacaaagaatgggcagagagcgcgtttttttgtcccaagtcatcccctttactgagcaaaaaaaagaatatctcctatatgagaatcatcaatcggggttaataagttttgcgtccccagagcgtttaatattgataggagtcatattatggaaggtaaaaacaagttcaatacttatgttgtttcttttgattatccaagttcttattccagtgtgttcttaagattaagaagtttgatgtatgatatgaatttctcctctatcgtggctgatgaatatgggataccacgacaattgaatgaaaactccttcgcaataacgacaagcttagccgcaagtgaaatcgaagatttaatcaggctcaaatgcttagacttaccggatattgattttgacctcaacattatgacagttgatgactatttccgtcagttttacaagtaaccaggaaggataagaagaacataaaaaatggcactattctctaaaatattaattttttatgtgattggtgtgaacatatcctttgtcattatctggtttatcagtcatgagaaaacacatattcgtttacttagtgcattcctggtcggaataacctggccaatgagtctgcctgtggcattacttttttctctcttttaagagctgtagttgagtggacccgctggttatcgtgaaacgaagcgtctctcctcaaaactggatttgcggaacgatgaacgaagcagtcgcctgactgcttcgttcattaaagtgaaatttatttctgtgggcgcatcgccgggaagagaataacgtcgcgaatagtatggctgttagtaaacagcataatcattcggtcgataccaatacccagaccagcggttggcggcagaccatattccagcgcagtcacgtaatcttcgtcatagaacatggcttcgtcgtcacctgcagctttagcattaacctgttcctggaaacgttcagcctgatcttctgcgtcgtttaattcgctaaaaccattaccgatttcacgaccaccgatgaagaattcaaaacggtcggtgatttccgggttaacatcattacggcgtgccagcggggacacttctgccggatattccgtaataaaggttggctgaatcagatgtgcttctgccacttcatcaaagatctctgtgacaatacgtcccaacccccagcttttctctaccgtaataccgatagattcagctaatgctttagcagcatcaaaattatccaggtcggccatatcggtttctggacgatattttttgattgcttcgcgcatggtgagtttttcaaacggtttgccgaaatcaaacacatgctcgccataagtgactttagtggtacccagaacctcttgtgccagggtgcggaacagactctctgtcagttcaatcaaatcgtggtaatccgcatacgccatgtagagttccatcattgtgaactcaggattatggcgaacagaaataccttcattacggaagttacggttgatttcgaatacccgttcaaaaccgcctacaaccagacgtttcagatacagctccggcgcgatacgcagatacatatctaaatccagagcattatgatgggtaataaacgggcgagcagatgccccacctggaattacctgcatcatcggggtttctacttccataaagccgcgcgcgaccatgaattgacggatagcggccagaattttactacggacaacaaacgtttgacgggatttatcgttagcgatgaggtccagataacgttgacgataacggacttcctgatcctgcagaccatggaatttatctggtaaaggacgtagtgctttagtcagcaggcgcagctcagtacagtgaatggaaagctcacccgtttgcgtcttaaacagcgtaccgcgggcaccgataatgtcacccagatcccattttttaaactgatcgttataaacaccttctggcaggctatctcttgcaacgtacagttgaatacggccaccgacatcctgcaacgttacaaaggaggctttccccatgatacgacgggtcatcattcggccagcaacgctgacttcaatgtttaaggattccagttcctggttatccttcgcatcaaactcttcgtgcaactggtcagaggtatggtcgcggcgaaaatcattgggaaacgccacaccttgctgacgtagtgccgccagtttttcgcggcgatttctcagttcatcgttaaaatcaatagcctcattggctccccgtgtttcttgttcagacattttggttcctctaaatccagctttcaatttagcgtagataaagagacagatcggtacactgtattatctgcctcgactattagtaactcagtttatcttatcgaaactaacgcttacctcaagttgatatcactaataaataaccatcaaaatggtttaaatgacttattaatctcgatttgttagtgttataaactaaaagttaatttattcataaccaattgtttttacgacagttaatcgttgctctcctgtatcatattcgtcggcgtgctaaacagaaaacgggtagcaaaggccaatacgacgatgatcgcgacacaagccaacgtccactctcccatctgagaaaagaatcgctggtaagctgcaattgccataccgctaatttggctctctgtcgtctgctgtgccacgacgcctgccagccagttggcgaccgcgcctgttgccagcatataaatcccggttaatacgccagacattttcagacgcgtgatttgcgcaatcgccaccgggtcaataaagagttcggcaaagcccattagcgccagcccggatatcatcacgcccatactcgcttgaccgtcagccgctgcatgtcgggcatcaaatgccaacaacataaagccacaagccatcagcagtaagccaaaggcaaacttcagccagacgcgcaatgtactgttgccgcggctttctgggctcgccagccaggccagtacaaccccagcgagcatcaccgcaattgcattcacgctctggaatagtgctgtaggtacttcaatattgaatgcctgacgattcacaaagcgatcgataaacaagctgatggtactgccgccctgttgtgccagtacccagaacaatgtcccgacaaacatcaacaatacaatttgccaaagagcacggcgatgttcggggaatttgatcatcatgcgggcaatgatttgtgcggcaatgaggcaaacgatcgccagcaaatatccggaccagtcgttctccagcagcagagtaaaaaatactggggctaaacagagcatcaccactaaccagctccatactggtaaggcaaatttgacactagtgagcgcttttttatccatactacgtgtggactggaaatgacgatgaccgcttaagaaaatcaacaaaccgataaacatgccgccacccgcaagggcaaagccaacatgccatccataccactgagcagccaggccgcaggcgattggggctgcgatagaaccgatattgcccgcagcatacagcaggctaaaaccgccatcacgtcgatgatcgttctcgtcgtagagctcgccaagcaaacagctgatgttacttttgaataaaccgtagccacaaataatgattgccagcgccagatacaggctaaaggtactatttgtatcaatacccagcaccacatggccaagggtcattaacagcgcgccggcaatcactgcagtgcggttgccgagcaggcggtcggcaagccagccgccgagaataggggtaacgtaaaccagagaagcatatgcgctgaacaggctgatggcatggttatcatcaaaaccaagctgatgggtgagatagagaatgagtaaggcacgcatgccgtaaaaactgaagtactcccagatttggatcgccacgatatagtatatcgcgcgcggctgactgggtgttttcatgtgttctccttatgagcaaaaaagggaagtggcaagccacttcccttgtacgagctaattattttttgctttcttctttcaataccttaacggtatagcggccatcagcctgacggtatgcaccgtgaatatcggtttcaaagcccggatagtgagcgccgatttcacacagcatctgcaggaactccagaaccggacgactttcttcggtgatcatttcacccggcattaccagaggaactcccggcgggtacggaaggatcatattggcgttaatacgacctaccatttcgtcgaggtaaacttcttcggtcataccgtgcagctctttctggaatgcagcatacggagtcattaccatcgtcggcagcacttcaaatgcgcgatacatcagatccggcagattgtggtgaacaatcagtttgtggatattctgagccagttcctgaatacgcatgttttcatagaattcaggatcttcacgatacagagacggcagcatgtttttcacacgcaggttcaggtcgaacgcacgtttaaagtcagtcagagcacgcagcaggctcagtgctttggtcttatcgataccgatgctgaacaggaacagcaggttatacggaccggttttctcaacaacgatgccatgttcgtcgaggtatttcgccacgatgctggccggaataccaaagtcgctcatggtgccgtctttttccatccccggagtcagcagggtgactttgatcgggtcaagatacatgtgctcgttatcgatgtttttgaagccgtgccaggtgctgtcagaacgcagcggccagcattcagtcgtatcgatatgatccggctgccatacatcaaagaaccagccatcagattccgttctcagacgtttgatctctttacggaatttgatcgcacgttcaatagaaccgttgatcagacgcttacctgcattgcctttcatcatcgccgcagcggtttcagtggacgccacgataccgtagtgcggagaagtggtggtgtgcatcatgtaggcttcgttaaaggtttcttcgtttacgtcacctttaacgtggatcatggaagcctgagagaacgccgccagcagtttgtgagtggactgggtttcgtaaatcactttcccttctacacggccaccgctcataccgcatttaccttcgtaaatcggactgaagttggtgtaaggcacccacgcggagtcaaagtggatggatttcacatccagtgttttcttgatgaagtcggtgttgtacagcagaccatcataggtagagttggtaattacagcatgtaccggccaggttgcgtttggtgtttctttcacgcgcttagcaatggtagcgtgctggaattcactctgtgggataccaccaagaataccgtaagcgttacgggtcgggcggaaatagattggcgtaacatcgctcatcatcatcaggtgggtcaggcttttgtggcagttacggtcaatcagaatggtgctgcctgctggagcagagtacataccaacaattttgttcgcagtggaagtaccgttggtcaccatgtagctgcggtctgcgttaaagacgcgagcgatatactgttctgcttctttgtgtggaccactgtgatccagcagagaacccagttcagatacactaatggaaatatcagatttcatggtattcggaccaaagaaatcatagaacaggctacctaccgggcttttctggaatgcagtaccgcccatgtgaccaggagtacagaaagtatatttaccttcacgaacatatttaaacagtgctttagtcagcggaggcagaatagtgttgatatattcgtcagtggtctgcttgatcttattagcaatatcttcagcagcacccagcgcatattcaaagaagctaatctgtaaacgcaggtcattcaggcttacatcgagagtggaatacgtattagcgaacgcgtacaacggcaggttctcgttcattttgctaatttcttcgcacagctcgagattatatttatcccagtcaaaaataacgccgcacagacgcgcattgttttcgatcagttttaataagtcgtcacggtcgttcgggtaaacaatctggaagttcagacgttcaagcgcgcgatgaagttcacggatgggttcttctttaaaataaacccccatgtgattcaatattgcaataacgttcatagtcatatctccaggtaaaaaaggcccctcccaacacatgggacaaaatgaaaggaggagcctcggaaaatacttttaattaatgtgcgttagacgcggtgtggttatccatactgtggctctggcgctcgtgcattttgcgagcgtagaacatcaggataatcaggctgacgatgaaggtacctgccagctcgaaggagcttgcgcccatcagcgcgatgaagcagaacacgcaacccagtacagagcagatcaggctgacaaagttgcggatgttaacgccttcaaaacgaatcaggtcaacgcaagagtagaaatacggcagcatagtcagcagtactgcgataccggtcagttcaccgaacaggtcagatgctttaccaccggcagagttcatcagagtgataaggatcatcagggcagtcattttcactgcagccagcagcagaccttttttcggaataccgttgctgtcgacttcaccataaactttcgggaagttaccgtcgttagcggcacgtacacctgcctggcctaccaacatcatccaggagcccagagaagtcaggcacgcaaaggcggtgaatgcagaaaccagcggcgcagcccagttaccgaggatagtactagcactgattgcaaacggagcaccggaagccgccattacagaagacggatacataccggaaagcacctgagtcgcagcgatgtaaacaatacctgctaaaccagtacccagcatggttgccagcggaacggtacgtttcgggtttttaaccataccagtacttacagctgcggattcaacacccacgaaggcccacaggcagagcagaatacttttaatgatcgcatgaccatcagtggtatccgcagtattccagttagctgcataagttgccgcatcaaaccaatgccagccaacaatagcagtcatcaccacaggaataagaaccagcaccagaccaatagtggttaaacggcttacccaagtaccgccgagcatatttacaaaggtaaatacccagacgatagcaatacaggcgatacccgccggaacaggatcatttaatactgggaagaaggtggaaagataagatacagcggtaataccaatcgccaggttaccaatccagttagcatggtaataaagaacacctgtctgaaaaccaaatgcaggggaaatttctccggcataagcaattgggccaccttgttgcgggttttttgttgccagtcgggcatatacatacgccaggctcattgcaccaataatagagataatccaaccccagatagcaataccaccgatacttgctaggttcgcaggtaataatgcaataccgctccccatcatattaccggcaacaacaccggtacaggcaaatagcccgatcttcttggcagaactcatgctcttctcctaatttcatttttgaatttggagtccgggtcatgatgtataactatttcctgaccagaccaaactggcgataagattactcacgaaaaaaggattaatcctaaagattaggtgaaataacacaaaagtttctgtaagtgagaacttgaggttttttattaacacatcaggatcgcaagttgatatcatgaaaagataaacatttaatgtttacaatggattgcgtgacattctctggttaaatttatgtaataaaaattatgcggcaaataaattgccgcaacatattataccaacaggaacatacaaaaactcaacaacaaatatttccgagcataaatcaacccggagttacttattcactagcaagaaatttgtcgagataaggtacaacataaggaacagaagtctggaatataccattttcaatccagtaaagggtgtttgcccctgggcgtaaattaaaggcggtgagatatgcatcagctgcttcccggttcatccccttcatttcataaaccttgccaagcaacacataatttagccaggacatttcaagatcaatgccagtatttatcgcctggtaagactcatctgttttaccttttaccagagcactgaccgcttttatttgatatataatggacaggttgttcaattccggcagtgtaacaatgttatctatttctgtgttcagtgctgctaattgtttttcatctaaaggatgttgagaatggcgcacgatatcaactaatgctttttctgctctcgcgtaggtaaattctggggaactttgaacaatctcacctaataattcactggcacggttcaaacttttatcatcgccatgcagtaaataatcatgtgcctgataaaaattagttaataacgcaccacgatgcggcaaaattttctggagcgtctcctgcattcgttgtggccacggttggtttaacgctttacttaaactctccagtaaatcattttgaatcgccagctgattaccgttagtgatgacataacgtttatccagcatggtactaccatctgcattgtctaccaattttatgctcataaagcattgttgagcacggtattggcgctgattaacaaacgcaatagataatgttttaccggaactgctcggttcatcaatgttgtagttgattttgtcatgcaccataaaggtggagaaggtgttaagacttgtcgccaccaaatcacccacgcctatcgcgtaagagagctgatacggggaactccagctgttacaacttttatttaccatattaatgtcaatatcgcgtggattgagcaaaatacggcttttgctcataggaagacgtgtatcaagactactaaacgctaccagtgctacacagatacctaagctcaacaggaaaaaaaaccatacccaaaaggtagtgaatcgtttgcttttaactggggattgttcaggtggcgttgcggtgttttgaatgttaagactgtgggagggagaatctgtggcaggaaccgcctctggtatagggggagggctagatagcattatttcctctccctcttcttcgctgtaccagataaccggcaccattaatttatagccgcgctttggtacagtagcgatatagacaggactatcttcatcattatcttttaaactcttacgtagttcactgatactctgcgtcacaacgtgattggtgacaatacttctcttccagacattatcgataagttcatccctgctaagtacttcgccactgtgttgagcaaagaaaaccagaagatcgattaatctcggctcaagggtaagttgacgcccattgcggctaatttggtttatggacggagtaacaagccattcgccaacgcgaactacaggttgttgcataatagaaactcattcgaaaagggaatgatgcaatgataattgccacaacctatttttaccatctatagatgggtttatttacatattattggtgaatgcaagacgttatttttaccagccataaacttcttgattacatagtattacgaaaggattttactgagaaccagaagtaatattccttaccatcaaaattcatcatctttgccaaagaaaaatgttcagaaaataatccatggaaaattgtccggagcacttactattttaatggattgttagtctttgcatgagcaagcgaactgatacatttctctttgttctcattcagaaaatctcatcagtcgccgttcagaccggtgttgtgctttatggatgcgttacgctcctgatgacgtcatttgacgttcaacagcatcacggggccgcacgacatttcacgtcagttagtgctatagctcaggaacaaattttcccgaattgggatatgcccgcaaattgctggtgatgtggggagaatctggttgagttcggtagaattgatttggaggcagaacgcttaaatcgtggcgtcctgaaacgaaaaacggacctccgtggaggtccgtttatatgaatttggtgcccggactcggaatcgaaccaaggacacggggattttcaatcccctgctctaccgactgagctatccgggcaacggggcgcattaaaccgtaatctgcacatctcgtcaacctaatttcagtaaaagcgattcaactgcttaagattgcggcaaatcgcttcttttctgtgtttctgtcaggtcaatgcaccaccctggcggcagcgggcgaagcgcaggatatcttccgccagccgatgtgcagtgtcgacatccgcctggctacgattcaccagcattcggcttaaacagccttccagcaccagttccatctgctttgctaccatcgccggatcgtcaacttccagtgtggttaacagttcgtgggtgaaatcgtaggccgcgcttttttgctgatcggccagttgatgaatagggtggccaggatcgggataaaacgtacaggcagcgataaatagacagcccggatagcggttgtttttaacgcactcgcttaacgcctgataacgtgccagcagcttttgttcggcggtttgcgtttcgtccagcatcagctgacgacgccagacatctatctgttggctaagataacgcagcgcatcgtagaggattgcctctttgtctggccagaagcggcgtagctcgtccagtggataatccacacgttcagcaaccatctccagcgtggtgttggcaatcccttgtaattctaataatttcagggcttctcccagtacatcttcacgttgcacgctattttcctccgtctttcccactgcaagtgtcgttcacggttggcgatcgcgcaaatgtgcgctgaaggtttcagcatccataaagcccgtgacgcgtgcttgtggatgctcctggccttgtccgtcaaaaaagagaattgtcggtaggccaaggacattaagatgctttaacagcgccacatcttgtgcgtcgttggccgtgacgttggcctgaagtaagaccgtgtctgctaacgctttttgcacctgcgggtcgctgaaggtgtatttctcaaactctttacaggcgacgcaccagtcggcataaagatctaacatcaccggtttgcctttggcttcaacgagcgcctgatttaactcatctaccgttttgatttgtgtaaagttgagatgcgtctgagtttgcgcggtatgcgtcgcaccaaatgcccaatcctgaagtgggcgcacgctaaccaatgccgctgccagcagaataatttgcacaatacgcatccagccgcgtttagcctgtaggctggtgataaaggcccagccaaagaatgcgacacccagcgcgctccacaagcgtaatccccatacatcaccaatcactcgctccagcaggaagaccggcagtgcgaggatcacaaaaccaaacgcggttttgacttgttccatccacgggccgcttttcggcagcaagcggttaccaaagacggtaattagcatcagcggcaggcccatgcccaacgcatagagataaagcgtgccgccgcccagccacatgttcccgctttgggcgatatacagcagaatcgcgctaagcggtgcggtggtgcatggactacagatcagtccggcaatcgcccccataacaaacacaccgccaggactgccgccctgttggcgattgctcatcaacgtgagacgtgtttgcaggctagaggggagttgcagggtaaacaagccaaacatactcatcgccagcaaggtaaagacgatggcgaggccaatgagcacgtatgggtgctgtagcgccgcctggaactgtaaccctgcggcggcaaccaccagacccagcgccgtgtaggtcagcgccatcccctgcacataaataaaggtcagcaacaatgctctggcagtggagagccgctgtttaccacccagcacgatgccagaaatcagtgggtacattggcagcacgcatggcgtaaaggcgataccaataccgatcaacaacgcccagagcgcggaaaagggcaattgcgcggtgggctgctcttgctgcggaacagacacaggctgtggcgctgcgttgttggcgaccacttcgcttaacggaacggttttggtttctggcggataacagaaaccggcatcagcacagccctggtaggtgacagttaacgtcgctcccgcactcgcctggttgatggtgacgggaagcgtcagccgatcgcggtaaatctcgcttttgccgtaaaactcatcttcatgccagacgccttgcggcagctgcacgtcggcaattttcgcgtgttccggcgtaatgcggatctgtttacggtagaggtagtaaccgtctttgatctgccaggtcagattaaggtcatgttggttttgctgaaaatcaaaagcaaaggcttgatccgcggggacaaattgactacgtcccggcgcgtcgaataatccggcaaaaacggaagtgctgcaaagtagcaggatcagcgtaaagatgcgttgagccatgagaggtaatctgtgtctccttatgtcagcgtaaagatgcgttgagccaactgaggtaatctgtgtctccgtgtgtaacaggtaaaaccagaagttccggggtttgatatggatgatgagacttcaggcattccagcagtgcctgctggtgagatacggtagtttttaaaatcatctgcacttcgtattcttgctccagcttaccttcccagtaatagagagaggtagcgccggggatcaaggtcgcgcaggccgccagtttttccgccagcactttggcggctaaatcctgggctgtcgcttcatctggtgccgtacatagcaccacgacagacgcggtattgctacttttttcatcaagcataaacacctcgcaagaacagatggaaccgcaagagagaggtcactatacaacggacgggggaaggatgttagtcggcgggaaagaaagcggggcgtgaacgccccgcgattgatcattacagcatgaagctacccagcacgaagccgaagcaaacggccagggcaacacccagagtacccgggatgaagaacggatggttgaagacgaatttaccgatacgggtagtacccgtgtcatccatctgtaccgcagcaaccagcgtcgggtaggtcggcagaatgaacagaccagacaccgcagcgaaagaagcaacagcggtcagcggactaacgttcagtgccagagccatcggcatcagtgcttttgcggttgcagcctgagagtacagcagagcagaagcaaagaagaagatgacggccagcagccacggatgaccctgaatcacttcaccagcggtatctttgatccagtcgatgttgttggaaacgaaagtatcgcccagccacgcaacacccaggatacaaatacaggcgctcatacctgctttgaaggtgctggagttgaggatgttgtcggtatcgactttacagataacggtggtcagagttgcaacgctgagcatgatgatcaggattgcgttggtggtgttcatcagcggtttttcaaccagacccatgcttgggctgttgatgattgcatagataaccacgccaactacgcccagcaggaacagccagacggacgtttttgcaccggatttgatttcaatctgcttttcaccgcgcagttcaaccaggccctcttccagacgcttgcgataaatcggatcgtcagagagtttggagttgaacagcatagtgaccaggaaggacatcaccagaaccgccagcagggtggacgggatgaccacggagagcagatggaggtagctgatgccatgaccttccatcacggaagacatgtaaaccactgccgcactgattgggcttgcggtgatcgcaatctgcgcggataccactgcagtagacagcggacggcaaggtttaacgccttgttccttcgcaacttcagcgataactggcagtgtcgccagagagatgttgccagtaccagcaaagatagtcaggaaataggtcacgatcggtgcgaggatcgtgatgtatttcgggttacggcgcagcagcttttctgtctgatgaaccagatagtccagaccgccagcaacctgcatggcagaaatagcggcgataaccgccatgataatggagatgacatcgaacgggatgttaccgggtttaacgccaatagcggcaagaaccagcacccccaatccgcctgcaaaaccaatacctattccccccaatctggcgcccaagaagatcgccagcaaaactatgatgagttctacaactagcatattagccttccttgttttttaacaagttgatattagattgttatttttaagttactgctcacaagaaaaaaggcacgtcatctgacgtgccttttttatttgtactaccctgtacgattactgttcgctttcatcagtatagcgttttgctttgtaagccgggtgcatcagattctgtacggagaaaatatcgtcaagttccgcttcagtcaacagaccgcgttccagaacgacttcacgtacactcttaccggtttcggcacagattttacccacgatgtcaccgttgtggtgaccgatgaacgggttcaggtaagtaacgataccgatagagttgtaaacgtaaccttcgcacacttctttgttagcagtgatgccgttaatgcatttttccagcaggttgtagcaagcgttggtcagaatgtgaacggattcgaacatggcctggccaatgaccggctccataacgttcaactgcagctgacctgcttctgctgccatggtaacagtggtgtcgttaccgatgactttgaagcatacctggttaaccacttccggaacaaccgggtttactttagctggcatgatggaagagcccgcctgcagttccggcaggttgatctcgttcaggccggcacgtgggccactagagagcaagcgcaggtcgttacagattttggacatcttcacagccaggcgtttcagcgcgccgtgaaccataacataagcgccgcagtcagaggtcgcttcgatcaggtcttcagccggtacgcatgggaagccagtaacttcagccagttttttcactgccagcggagagtactctttcggcgtgttcagaccagtaccgattgctgttgcaccaaggttaacttccagcagcagttcagcggtacgttggatgtttttcacttcttctttcagcaggatgctgaaagcgcggaattcctgaccgagggtcatcggtactgcgtcctgcagctgggtacgacccattttcaggatgtcctggaattcgacagctttacgttcaaagccttcacgcagttggttaatcgcatctaccagcttaatcagggaagagtaaactgcgatacggaaaccggtcgggtaggcgtcgttagtggactgacatttgttaacatggtcgttcgggttcaggtactgatattcacctttttggtgacccatcagttccagaccgatattggccagcacttcgttggtgttcatgtttacggaagtacctgcgccgccctggtagacgtctaccgggaactgatccatgcattttccgttgttcaggacttcatcacatgcggcaatggtggcattcgctacacttttaggaatggtttgcagctctttgtttgccatagctgcggcttttttaaccattaccataccgcgaacaaattcaggaatatcactgattttgttgttgctgatatagaagttttcaatcgctctcagagtgtgaacaccatagtaggcatcagctggaacttccctggtacccaacagatcttcttcgatacgaatgttgttactcatgtgaaccttctttttcaagctgccaatgatttgctttaaacacacagaatatatgtggtttcgaatgtttttcgaccgacgattatcccctgcatcgaccgaatacccgagatcatatgctgcttgaggatttctaccgtaatctggatcactttaagtgtcggtttttaccccttaattattaatttgtgaaatagatcaccgctttgggattactaccaaaaatagttgcgcaaacatcttgaaattttgctaatgaccacaatataagctaaacgcgattcgcaacccattcaggtagccggggttaaccggctgctattacaggagaaacctttgcgctggttaccttttattgccattttcctttatgtctatattgagattagtatctttattcaggttgcccatgtattgggggtattgctgaccctcgtgctggttatattcacgagtgttatcggtatgagtctggtacgtaaccagggctttaagaatttcgtgctgatgcagcaaaaaatggcggcgggtgaaaacccagcggcggagatgattaaaagtgttagcctgatcattgctggtttgctgcttttattaccgggcttttttaccgacttcctcggtcttctacttttattgccgccggtgcaaaagcatctgacagtgaagttgatgccgcatttgcgcttttctcgcatgcctggcggcggttttagcgccgggaccggtggcggtaatacttttgatggtgagtaccagcgaaaggatgatgagcgcgaccgccttgatcataaagacgatcgccaggattaatgtcgaaacgccggattatgtggttatgccattttccggcgtttttcgttttggcagcaacagccataaccccgccagcatgatcagcgcatagagacttttccagccgaccattgccagtaacagaacgcataacagcccgccaaccaccgccagtagtcgataacgtccttgcaataatttacagcctgccagcatgcataacagataaatcataataaagatgccattggcataaataataagagcgtccagattgatctctaaagcatgaatcaccaaagtgctcaccacacagcagccgagcaccgcattgagggcattattcgggatatggcgagaagagaggcgtgccaggtagtggtcaggattatgttgcgcctggctccagaccaggcgggcgaagctctgtatataaatgttgagactggcaaagcaggccagatagccaatcacgcaggcaatccataacgctcctacaccgaacaactgcactacaatttttggaaggcttgctgccgccgccattttttcaccataggcgtcgaagtgtaagacgactaccgtacagccccagtagactaatcctgccagcagcagaccaatcatcaaagcacgaggaaaatcacgctctggatttttaaattcgctggcgagatgggcaaatgcctccagaccgacaaaacaccagaacatcacacttaacgcagcaaataacccggtaagttcgatattaccaggtgccggaaaggggatattcgcaggtttgatatcgcccgcccaccagatagcgacaatcagcgcgacgataagtccggcaataacggtttgtagattagcactggaactggcaccgcgagtaccgatataccacaccagcgccagcgtaccgagttctgccaacaacagttgccagctatgccagccaaacatcgcctggccgaacccggcggcaatttgtagtgcggcaggcaaacccacgggaatgacgcttaaaaacagccagccggtgactcgctcaagccggctaccaaacgccataccgacgaagtgcgcgacgccgcctgcgctgggatagtggcgacccagaatcgcaaacacaatcgcaatcgggaacactaagataatcaaaacgggccacgcccacaggctgttattgcccgctaccagcgcagctaacgcaggaacggcaaacacgccagtgcctaataaactcgtgcttagcaggccaatgccctgggccagccccagttcttgtttgagtccactcatgggttgatgtccgattgcgcccaaattttgggcaactgcgtagattttcgatggtagcacaatcagattcgcttatgacggcgatgaagaaattgcgatgaaatgtgaggtgaatcagggttttcacccgattttgtgctgatcagaattttttttctttttcccccttgaaggggcgaagcctcatccccatttctctggtcaccagccgggaaaccacgtaagctccggcgtcacccataacagatacggactttctcaaaggagagttatcaatgaatattcgtccattgcatgatcgcgtgatcgtcaagcgtaaagaagttgaaactaaatctgctggcggcatcgttctgaccggctctgcagcggctaaatccacccgcggcgaagtgctggctgtcggcaatggccgtatccttgaaaatggcgaagtgaagccgctggatgtgaaagttggcgacatcgttattttcaacgatggctacggtgtgaaatctgagaagatcgacaatgaagaagtgttgatcatgtccgaaagcgacattctggcaattgttgaagcgtaatccgcgcacgacactgaacatacgaatttaaggaataaagataatggcagctaaagacgtaaaattcggtaacgacgctcgtgtgaaaatgctgcgcggcgtaaacgtactggcagatgcagtgaaagttaccctcggtccaaaaggccgtaacgtagttctggataaatctttcggtgcaccgaccatcaccaaagatggtgtttccgttgctcgtgaaatcgaactggaagacaagttcgaaaatatgggtgcgcagatggtgaaagaagttgcctctaaagcaaacgacgctgcaggcgacggtaccaccactgcaaccgtactggctcaggctatcatcactgaaggtctgaaagctgttgctgcgggcatgaacccgatggacctgaaacgtggtatcgacaaagcggttaccgctgcagttgaagaactgaaagcgctgtccgtaccatgctctgactctaaagcgattgctcaggttggtaccatctccgctaactccgacgaaaccgtaggtaaactgatcgctgaagcgatggacaaagtcggtaaagaaggcgttatcaccgttgaagacggtaccggtctgcaggacgaactggacgtggttgaaggtatgcagttcgaccgtggctacctgtctccttacttcatcaacaagccggaaactggcgcagtagaactggaaagcccgttcatcctgctggctgacaagaaaatctccaacatccgcgaaatgctgccggttctggaagctgttgccaaagcaggcaaaccgctgctgatcatcgctgaagatgtagaaggcgaagcgctggcaactctggttgttaacaccatgcgtggcatcgtgaaagtcgctgcggttaaagcaccgggcttcggcgatcgtcgtaaagctatgctgcaggatatcgcaaccctgactggcggtaccgtgatctctgaagagatcggtatggagctggaaaaagcaaccctggaagacctgggtcaggctaaacgtgttgtgatcaacaaagacaccaccactatcatcgatggcgtgggtgaagaagctgcaatccagggccgtgttgctcagatccgtcagcagattgaagaagcaacttctgactacgaccgtgaaaaactgcaggaacgcgtagcgaaactggcaggcggcgttgcagttatcaaagtgggtgctgctaccgaagttgaaatgaaagagaaaaaagcacgcgttgaagatgccctgcacgcgacccgtgctgcggtagaagaaggcgtggttgctggtggtggtgttgcgctgatccgcgtagcgtctaaactggctgacctgcgtggtcagaacgaagaccagaacgtgggtatcaaagttgcactgcgtgcaatggaagctccgctgcgtcagatcgtattgaactgcggcgaagaaccgtctgttgttgctaacaccgttaaaggcggcgacggcaactacggttacaacgcagcaaccgaagaatacggcaacatgatcgacatgggtatcctggatccaaccaaagtaactcgttctgctctgcagtacgcagcttctgtggctggcctgatgatcaccaccgaatgcatggttaccgacctgccgaaaaacgatgcagctgacttaggcgctgctggcggtatgggcggcatgggtggcatgggcggcatgatgtaattgccctgcacctcgcagaaataaacaaacccccgggcagaaatgtctgggggtttttcttttggtcatctttctagtataagattcagacacggacgacgcgagtggcgtccagctcattgattatggggaataacatgcacgtaaaatacttagcagggattgtcggtgccgcgctactgatggcgggttgtagctccagcaacgaattgagtgctgccggtcagagtgtacgcattgtggacgagcagccaggcgcagagtgccagctgattggtactgcgacaggtaagcaaagcaactggctttccgggcaacacggagaagaaggcggttctatgcgcggcgcagcaaacgatctgcgcaaccaggcggctgcaatgggcggtaacgtgatttatggcatcagtagcccgagccagggaatgttgtccagttttgtcccgacggatagccagattatcggtcaggtttataagtgcccgaactgatgtgatccagaggctgggtgacaaacgtataattgcctgatgcgcttcgcttatcaggcctacataaggcattgcaactgattgaatgcttgagaatttgtaggccggataaggcgtttacgccgcatccggcatgaccaacgatcacgttatcagtcatttcaggctggatggctccagcctcgcattagcaaagatgagattatttcgcctgtggtgcagttttgctggtggattgaacacgtaagtgatgcagcgcgcgtaagcattgatcctgggttagcggttgggcgttattcgccgctacggtgcgaacatagacctgacatggcacacccgcgagttttttcagtcgtgggctgaaatcaagcattcggcgagtgatcgcttctatttctttacccggcgttgcttcacgcgttttcaccactgcgccgctaaattgttctttgccactttcatctttaaagcggtaaagcaccgccagataatggtcgaacaagttatgtttccattccggttgggaataggtgtcatattccagattgccattgtcctggcagtcaacgtcgtataacggcaggaaatctaacagactggtaatacgtaatgccagttcacgcatttccgcattattaattgcatgaatgattgctcgcgccagcatttcaatctgcaactcattgacgactaactcacatttgctaccgtcatgtagcgttaatacgaaggtaagattttcgccttgattatcggtaagttccagcgtgttaacccgacgattaatatcggcatttttaagctcatcaaccagaatttctgggatgttttctgccattttcttaatgactttatcgcgagcttgctcatactgaaggtgtgcagcagcatccagtttatgcttttgatgcagacgactttccagcgcaatcagcaggtcgcgcagttccatgacagacataaagaacaagctttctttattgcgaggttctttaattttcagcgccagtgcaatgaaattattactcttgcgaataacaccggtattaacacccttgatgcttatggccatgtaggttctccctaaccatttctcaattaaataattaattttaatttataagccagataaatgggcttggtagtaatagttgttaaaataacataaatagccgtactcactctatataaacagaaaagaaaggttaattattggtgttagctatataaaaagtaacaacagcaatgcatatgaataattaaaggttatgcaacgggcaaagattaaacttcccagtttaatgacaggttgctgtacttgcgtttgttgctcttgccggatgcagcgtaaacgccttatccggcctacagttcattgcaaatccattcaatttcaatgcacgatgtaggcctgataagcgtagcgaatcaggcaattttaatgtttaacttccctgtttaatcagttactgctggcgtagctggagatccagcggcgttttgctgggttcgccgccaatttctcgcgccagtttcggcaccagatatccgctcaccagtgtcagcaactcacgcataatctgccgtgcttcgtcatcactcaccataaaatgcgccgcgccctgtactttatcgagcacatgcaggtaatacggcattacgccggcatcgaacaacgcattactcaggtttgccagcgtttgtgcgttatcgttcacatcacgtaacagaacgctctggttcagcaaagtaacgcctacccggcgcaacttagccatcgcctgacggaatgtttcatctacctcattggcatggttgatgtgattcaccagcaagatttgcagcgtagaacgggcaaagcattcaaccagcgcctcggtgatacgtgccgggatcacaatcggcagacggctgtgaatccgcagacgttttatatgcgggatggcttccagttgtgtgagcaaccagtccagctcgtgatctttcgccatcagcggatcgccgccggagaaaatcatctcgtccagttccggatgcgcagcaacatactcaagtgcagtttgccagttacgcttgttgccctgattttcggcataggggaagtgacgacggaagcaatagcggcaatttaccgcgcagccgcctttgaccagcaaaagcgcccggttgtggtatttatgcaacaaaccaggcactacgctgtgctgttcttccagtgggtcggtggagaatccgggcgcgatgacaaactcatcttggctggtaagtacctgacgcaaaagaggatcgtccggattgcctttctccatgcgatcgataaaactgcggggcacacgcagggcaaaaagctttttggcgctgcgtccggctaacagtttttcctccgcgtctatattcaaaagacgcagaagttcatcaggatcggtcacaacatcggcaagttgcgttaaccaatcttctctggatggggtatttagggttacaatatgcgccattttgtggcttagctaccaattaacaaatttcagagggccttatggcaacgtactatagcaacgattttcgtgctggtcttaaaatcatgttagacggcgaaccttacgcggttgaagcgagtgaattcgtaaaaccgggtaaaggccaggcatttgctcgcgttaaactgcgtcgtctgctgaccggtactcgcgtagaaaaaaccttcaaatctactgattccgctgaaggcgctgatgttgtcgatatgaacctgacttacctgtacaacgacggtgagttctggcacttcatgaacaacgaaactttcgagcagctgtctgctgatgcaaaagcaattggtgacaacgctaaatggctgctggatcaggcagagtgtatcgtaactctgtggaatggtcagccgatctccgttactccgccgaacttcgttgaactggaaatcgttgataccgatccgggcctgaaaggtgataccgcaggtactggtggcaaaccggctaccctgtctactggcgctgtggttaaagttccgctgtttgtacaaatcggcgaagtcatcaaagtggatacccgctctggtgaatacgtctctcgcgtgaagtaatgcggttgtggtgcggcctgcaggctgcaccatcacttattcaggtcagagatgatgaaacgccttatcgttcttgttttgcttgccagcacgctgctcacgggctgtaacaccgctcgcggtttcggcgaagacatcaaacatctcggcaactccatctctcgcgctgccagctaatttttcttctcttccgaaaaatcatcagattcccatcatttttggcgatgttgtctattattaatttgctataggcaaacataaataacattacctaaaaggaagacgttatggtgaagaagacaattgcagcgatcttttctgttctggtgcttagtacagtattaactgcctgcaacaccacgcgtggcgttggtgaagacatttctgatggcggtaacgcgatttctggcgcagcaacgaaagcgcagcaataagcaataacggtacgacagctgtgtcgtgccgtttgttttttctgcgatagtcacaaaggtaatagttgaaattcccctgccacctggcaaaatatccgttcaaccatcagctttgcaggacgacctgcaaacgcctcttttcaccggggacggccccaattctccggagcctgatatgtcctggattatcttagttattgctggtctgctggaagtggtatgggccgttggcctgaaatatacccacggctttagtcgtttgacgccgagtgttattactgtgacggcgatgattgtcagtatggcgctacttgcctgggcgatgaaaagcttaccagtagggacggcttatgccgtgtggacgggtattggcgcagtcggcgcggccataaccggcattgtgctgctcggtgagtccgctaacccgatgcgcctggcgagtctggcgttaatcgtattggggattattggtctgaaactcagcactcattaactaccaggctgctgtacccaaataaatttactgacatcaaacccttcccgggtcgcgactgccagcatctcctgtttcacttcgtcagaaatggttggcgtgcgggagagtatccacaggtagtcgcggtccgggccgcaaaccagcgcatggcggtattcccgatcgagtgcaataacgttataaccgccatagaaaggaccaaagaaactcactttcagcgcagcgcgagttggtgcgccggtaaagtacgctttcccttcactctgctgccacattcctctgtcagggttatagcctttattaatgacattcaggccgccgtcatcacgcaggctgtatgttgcggtgactttttccagtccacgttcaaagcggtgatcaaaacgggcaatctcataccaggtaccgagataacgtttggcgtcgaaattatttactacggtcacgccacgcggcggcgtaggagaactgcaggcaacgaccagaaatgcagctgtcgctgcggcaacgagagggagcaggcgcataaatgtttccttactggtttttttctaagtgtagatgacagcaaggaaaagcggagaaaaggtccgaaaattcggacccgatggaattttactgtagagcgttaagaatctgccaggcggcgtcgactctcgctggattgggatagtttttgtttgccagcatcacgatacccagctctttttctggaataaacgcgacatagctaccaaatccgccggtcgcccctgttttatgtacccaacttgcgcgtactgcaggagttgggggcgtaatcgcttttacggggcgtgctgccagtgcaattttattgtcactgccgttaatgatgctgtcaggatttaccggccagtccagcatttcccagcccaggccctgatacatatcgccggtttgccagtagcgagattgtgccagttgtatcccttgttgaagcgttttctcattgatatcaaggggttttaaattgctttgcacccagcgggccatatcttcaatggtgctcttcacaccataagcttcagcatctaacgccccagggctaacatgcactgccttaccttcgcgatatccccaggcgtaattcttttcttctgcgggcggtacattaatccacgtatggttgagtttgagtggctggaagacacgagtttgcatcgcctgctcaaaactcaaaccagacggcttcacagccagtgcgccgaacaaaccgatactggagttggcatacagacgttgtgttcctggagcccatgcaggctgccagttttgatagaagcgcagcaagtcgctactggatttcacctcatccggcacctgcaatggcaggccgccagcagtgtaggttgcgagatgtaatagtgtgatcccattccactgtttagcggtaagttcaggccagtattttgttgtgggatcgcttaacttgatttcccctcgagcaatagcgtcgccaccaagcacgccagtaaatgttttgctgacgctacctaactcaaacaacgtttgctgtgtgacgggctgctttttggcgatgtccgcatagccccaggtaaagtaataaggtttaccctgataaattaccgccaccgccatacccgggatcttttgttgctctataagcggggtaattgtgcgatgcacaatatcgttgatttgttgaggggcagcaaatgtggagcaagaggcggtaattaataaggcgcagagcgtcgttttgaacatagggtctggtttccatacaaaacggcccgccataggcgggccggatttacattggcgatgcgttagattgtaacgacaccaatcagcgtgacaactgtcaggatagcagccagaccgtagaaaacccatttgcccgcaggtacgtggattttcagatcgtgcatcgcgtggtgcatacggtgtaaaccacaccacagcggcagaacgatcatcaggaacaggaatacgcgaccaatgaagctctgcgcgaacgccagaacgcgctcgtagctcagcgcatcacccggaaacaaccccagtggcagcagaatacccaccagcaggatcatcaccggcgcaatgatggcgctccacataccaccggccccgaagaggccccagaataccggttcgtcagaacgctttggatttggattaatcatctcaggctccttaccagtacagggcaacaaacaggattacgatggtggcaaccacagttaccgcccagagacttttgataattggctctggtcccattttttcgtcttttacaatgatattggccgctttcggtgccagttcaaaccaggttttggtgtgcagcagagctgccgccagagtgatcaggttaatgatcacgataaccgggttttgtaaaaagtcgacgaatcccgcccaggcttccgggccatttttcagggcaaacagcccgaaaatcagttcaatgctgaaccacacagccggaaccgccgtgccttcgcgcagcatgtaaaagcgataaaacggcaattttttccaccaggtggacgtcattggccgtacatacggtttacgtttagtcgtcatgttgcactccttagcgtggtttcagggtcgcgataagaaagtctttgctactttctactttgccctgctgaatggccgcagccggatcgacgtgtttcgggcagacttcggagcagtagcccacgaaagtacagctccatacgccgttctggctgttcaactgcgccatacgctccttcttaccgtggtcgcggctatcttcgttataacgatgcgccagcgtaatggcagccggaccgatgaactctgggttcaggccaaactgcgggcacgcggcgtagcacaaaccacagttgatgcaaccggagaactggtgatacttcgccatctgcgccggggtctggatgttagtaccctgatccgcggtgcgggagttgccgatgatgtacggtttgatcgcttccagactttcgatgaagtgggtcatatcgaccaccagatcgcgttcaatcgggaagttagctaacgcttcaaccttcataccgtcggtgtaatcacgcaggaaggttttacatgccagttttggcacgttgttaaccatcatgccgcaggaaccacaaatcgccatacggcaggaccagcggtagctcaggtccggtgccaggttgtctttgatgtagcccagcgcatccagtaaactggtagttgcgtcataaggcacttcatagaatgcgctatgcggtgcggtatcgacttccgggttatagcgcaccacctcaattttcaggtttttcatctcagccattcgccttctccttcttattggctgcttccgccttatcggctgcatccgcttcgccaccgtaaacgcgtttagctggcggcagcgtagtaatcttcacgtcgctgtactccaggcgagtcgtgccatcagcatcgcggaaggcgagggtgtgtttgaggaagttgacgtcgtcacgctcggtgcaaccttcgtccagacgctggtgcgcgccgcgggactctttacgtgccattgcggagtgcgccatacattcagcaacgttcagaccgtggcccagttcaatggtgtagagcaggtcggtgttgaacacgctggaagtgtcggtgatgcgcacgcgcttgaagcgttcctgcagctctgccagcttgtcgatggttttctgcatcagttccggcgtacggtagataccgcagccttcttccatagccaggcccatttcgtcgcggatcttcgcccagttttcgccgccatcctggttaaccagatctttcagacgttgttcaacgccagctgcctgcgcttcaattgccgcttcgttgccattaccggcagttgctgcacgctctgtcgcttgttcaccggccagacggccgaagaccaccagttccgccagggagttagaacccagacggtttgcaccgtgcagaccaacagaggaacattcacccacggcgaacagacctttaatgcgggtttcacagttctgatcggtttcgataccgcccatggtgtagtgtgcggtcggacgtaccggaatcggttctttaaccggatcgacgccaacgtacgctttcgccagttcgcagatgaacggcagacgttcatgcagttttttctcgccgaggtgacgcaagtcgagataaaccacatcgccacgcggcgtggagatggtgttgcctttacgccattcgtgccagaaggcctgagagactttgtcgcgtggacccagttccatatatttgtttttcggctcgcccagcggagtttccgggcccatgccgtaatcttgcagataacggtagccatttttgttgaccagaataccgccttcaccgcggcaaccttcggtcatcaggataccggaacctggcagaccggttgggtgatactgaacgaattccatgtcacgcagcggaacgccgtggcttagcgccatacccataccgtcaccggtaacgatgccgccgttggtgttgtaacgataaacgcgacccgcaccgccagtagccataacgaccgcgttagcacggatctgcaccagcgtgccttccatcatgttcattgctaccaggccgcgaacatgaccatcatcaaccagaatatccagcacgaaatgttcgtcaaaacgctggatctgcgggaattgcagagaggtctggaacagcgtgtgcagcatatggaagccggtcttatcggcggcgaaccaggtgcgctcgattttcatgccgccgaagcgacgtacgttgacgctaccatccgggcgacggctccatgggcatccccacagttccagttgggtcatttcggttgggcagtggtggacgaaataatccacgacatcctgctcacacaaccagtcgccacccgctactgtatcgtgaaagtgatattcgaagctgtcatgatcctgcgcgacagcggcggagcccccttctgcagcaacggtatggctacgcatcgggtatactttactgattagtgcgatttttgcattcggatttgcctgcgcggcagcaattgcagcacgtaatcccgcgccaccggcgcctacaatggcaagatcggcttgaaaggtttgcacgacattcctccagattgtttttatcccacagccacgtacttcagggtaagtacctgaaagttacggtctgcgaacgctattccactgctcctttataggtacaacagtatagtctgatggataagtctgaaatttgacgagatcgatttttttagtgcgcaagagggctaaattatcactgaagatgattaatttaattactaaaccatcagatcgtgctttttttagtcactgcccaccgctgtttgattcctgcgtaaaatttgtctcgccgtcgcgttgcgagtagacttcgtgcccttgtcaaaaactggagatttaactatgagcgaaacggcatcctggcagccgagcgcatccattcctaacttattaaaacgcgcggcgattatggcggagatccgtcgtttctttgccgatcgtggagtgctggaggtggagacgccttgtatgagccaggcgacggtaaccgatattcatttggtcccgtttgagacacgtttcgttggccccgggcatagccaggggatgaatctctggttaatgaccagcccggaataccatatgaaacgcctgctggttgccggttgtgggccggtattccagctgtgccgcagcttccgtaatgaagagatggggcgttatcacaaccctgagttcactatgctggagtggtatcgaccgcactatgatatgtaccggttgatgaacgaggtggacgatctcttacaacaggtgctggactgcccggcagcagaaagcctttcttatcaacaagctttcttgcgttatctggaaattgacccgctctctgccgacaaaacgcaactgcgggaagtcgcagcgaaactggatttgagcaatgttgctgataccgaagaagaccgcgacacgctgctacaattgctgtttacctttggcgtagagccaaatattggcaaagaaaaaccgacctttgtgtaccactttccagccagccaggcaagtctggcgcaaatcagtaccgaagatcatcgggtcgctgaacgctttgaggtttattataaaggtattgagctggcgaatggtttccatgaattgacggatgcccgtgagcagcaacaacgctttgaacaagataaccgtaagcgcgcggcgcgcggtttgccgcagcaccccattgaccagaatctgattgaagccttgaaagtcggtatgcctgactgttccggcgtggcattaggtgttgatcgtctggtgatgttggcgctgggcgcggagacactggctgaagtcatcgcctttagcgttgaccgggcataattctgaaaaattactgaattaacagcgaagaatggcgtgataagcgccattctgtagcatatgttttcatttttccgttaaaggccacaatttaagactggatatttgatatcatccaggtatcaattctgtattggtttttacgctgcctgctcaatgttgcgcagtgcagttcagtgggcacgtgttatacacgcgctgaaatgaaggatggtttcatgcctcacacgataaaaaagatgagtctgataggactcatattgatgatctttacttccgtatttggatttgccaatagcccaagcgcttattacttaatgggttatagtgcgattcccttttatatattttctgcattgttattctttattccattcgccttaatgatggctgaaatgggagctgcttatcgcaaagaagaaggcggtatctattcctggatgaataatagtgtcggaccacgttttgccttcattggtacgtttatgtggttttcctcttatatcatctggatggtgagtacctccgcgaaagtttgggtaccgttcagtacattcctctatggtagcgacatgacccagcactggcgtattgccggactggagcctacgcaggtggttggtctgctggctgtggcatggatgattctggtcaccgtcgttgcttctaaggggattaataaaattgcccgcattactgcggtgggcggtattgcagtaatgtgtctgaatttagtattgctgttagtaagcattactattttgttattaaatggtgggcatttcgcgcaggatattaatttccttgcaagtccgaacccgggttatcagtccggtctggcaatgctaagctttgtggtatttgccatttttgcctatggcggaattgaagcggttggtggtctggtcgataaaacggaaaatccagaaaagaactttgccaaaggtattgtttttgccgctattgttattagtatcggttatagcctggcaatatttttatggggcgtcagcacaaactggcagcaggtattaagtaatggttccgttaacctcggcaatattacctatgtgctgatgaagagccttgggatgacgctgggtaatacactgcatttgagtcctgaagcgagtttgagcctgggcgtatggtttgcgcgtattactggacttagcatgttcctcgcctataccggtgcgttctttacgctttgctatagtccgttgaaagccatcatccaggggacgccgaaagcattgtggccggaaccgatgacgcgcctgaatgcgatggggatgccgtctatcgccatgtggatgcagtgcgggttggttactgtcttcatcctgctggttagctttggtggcggtaccgcaagcgcgttctttaacaagctgacgctgatggcgaacgtgtctatgacgcttccttacctgttcctcgcgctggctttcccgttctttaaagcacgtcaggatctcgacagaccgtttgtgattttcaaaacgcatttgagcgcaatgattgcgacagtggttgtcgtactggtggtgacatttgcgaacgtcttcaccatcattcaacctgtggttgaagccggagactgggacagcacattgtggatgattggcggccctgtcttcttcagcctgttagcgatggcgatttaccagaactattgcagcagagtggcaaaaaatccgcagtgggcggtggaataacccgatgccctatcgtctacctgacgatagggcgtaaagacaggaaatgttatggatgacaccagccgggacccggcaataaccgaagatgaaatcagggcgctgcaattttctgccggggatgtagcggaaatagagcagacgattctctcttttgtcgatgcctgccacacccgtaaagtggcgatggtggtgggtagcaccattaacaccctcaaagatcgcgatggtaaacggtggggaaacctgccggatatttattgcgcttatcttatccgatgtctggtttttcgcggggaattagtgggatacggcgatttgtttcgtatgcgctatagcgaaattaagcgaccggttaccttatgagtgcgcgcatgtttgtcttatgctgcatctggtttattgtggcgttcctctggataaccatcacttccgcgctggacaaagagtggatgattgatggacgcgggattaacaacgtctgcgatgtgttgatgtatctcgaagaagacgatacccgtgatgttggtgtgataatgacgttaccgctctttttcccttttctctggttcgctttgtggcgaaaaaaacgcggctggtttatgtacgccaccgcgctggctattttcggctactggctgtggcagttttttctgcgctatcagttttgtttgtgagccggattggttcatccggcacacaaacttacaaacttcccgcctgacgacctttgcccgcagacgtcagcgttctccccgtttgtttaccgttgaggctttccagacgcatctggaagggcgggaatggcatatcgataccgtgggcatggaagccagccagaatcagctggtggatctcatggcgtagcggcatacggtgacccatctcagcggcgtaaatacgcagctcgaaaatctgaatcccctgttgcagatccaccaggaagacttccggtgccgggttgtcgatcaccaggctgcagcgacgcgctgcggtgagcaggatttccgtcacttcttcgctattggcatcggcaggggccggtatcgtcaacaccacgcgcgtgacgctgtcagagaggctccagttgataaactgctcggtaataaacgccttgttcggcacgattatctctttacggtcccagtcgctgatggtggtggcgcgggtgttaattttcgtcacgctaccggtgagatcgcgaattgtcaccgtatcgccaatgcgaatcggtttttcgaacaggataatcagaccagagataaagttggcgaaaatttcctgcaaaccaaaaccgagaccaacaccgagcgcggcaaccagccactgcaatttgctccactcaataccaatcatactgaagccgaccagcccgccaatcagcatcagcagatatttggtgatggtggtgatggcgtaacccgtacccggcgttaaatccaggtgctgcaaaatcgccagttccagcagcgcgggcaagttgcgcaccagctgcgtggtgatgataaacaccagaatggcaatcagcaccgcaccgagggtaattggctccagactttctacgccctgtaccgtggaggtgacatcccacaggctaatattttcgaggaagccgaaagcggaatggatttcactccacagcacaatgacagaaagcagggcgatcaacatcaaaatactgcgcaccagccgcaaggattgcgcactgatggcatcgagatcgacttcgctttcatcgacttcaattgctccttccgggctactgtgatgatgcgcttcctcttcgccacgcgcacgttgcgctaacatctctgcccggcgatgcttcgcccgatcaaacgccagcctgcggcgctggatcagcatccagcggcggataacgtgataaaccaccagtagcaggaaccagatggcaacgctggtttcaagcctcgctaacagcgcctgtgccgttgccagataacccaccgcgctcgccagaatggcaaccaacggcgcgccaatcatcatgttccacagcatatggttggtaatgttgtcgccgctgccctctttgttgagatacagcggaatcccggcctttttcaggctgagggtgaccaccgccagcgcaccgcaaatgaggataaagcaaagccgtcccaggctaccggagaattcacggtcgtcgaggttatcgaacatcatcagcgccataatcagcggcacaataagcccgatgctcatcaggtagtagcgcatcccacgggaaacacgttcgcgcggccagccaaaatgagcgataaacaagccgttcgggcgggcaaaggtggcgcaaatcatcactacccacagcagcggcacggtggccgttacaccatcgccaatcgcgaccgccagcggataaggccacgcctcgcgcaagccgtaacccagcgtcatccacagcaccggtaacggactcgcgacgagaatgctccagaaaagagtgcgcaacgtcagccagaagtgatcctgagtcactttgccaactttcgccgcgctacgttcaagaaaacgggtgaaatagcggcggctgtaaatactgcaaccgaccagaatcaacgcgccaaacagcggcaaaattgtctctttgctggtcagcatcatcacactggctttgcccaactgactgaaggtgtccaggctaatgagacgacgcagatcctgggcgatttccagcggccaggcgatggtcatcgggcgcacgtcagaggtccagaacagatagcggtgcgttgcttcgttcacctctttcagcgcatcctccagttgcccgttggagactttcagcttggtcagttccaatagtagcgtgtcgccaccctgcaacaaactgttcagcaactcacgctgagtgcgcagttgtgcttccagaatacggttttgctcggcagtcagcggctgaccgtcggcctgatgaatttgccgtagcagcggctgtttattaagcagatcctcataacgtaaccgttgcacacgcaactgcgccatttcggtatcaagctgttgtggtttcggcatttccggcagccgtgccacctgcgcccgcagcgcttcgccgagcagattggagcttcccagccattggctctgttcacgcagcgtattcaacgcctgccggacctgtaacgtctggctggcagcctgacgctgttggctggcaacgagatccatccgctgcgcctgttgattcaaagccgcgcttagttcgcggttaattttgaattgcgcgacgatatctttcggcaaatcggcgctgttttctgccagcaattcggtactttccagcgcccgctccgcctcaagctgacgttggctgtttaattgattacgcaaggcctgcaaatacgcatccagttgctggctctctttttccgccagctcactgcgtaagcgcgctaattcctggcggttattggcagacagctgcgccagctccagttcatcaacgagcgccttaagacgtgcagagtcagactgcaacgcgaaattttgtgcctgattgagcggagtattgccggtaagcgttcccaggcggcgctcgatctcatttaactgacggcgggcgtcggtttgctgttgcggcagttgattcaggctatcggcaatctcgcgggcgcgctcctgctcttgctgggcctgacggcttttatccagcaactggctgctgacctggagaatttcctgattcagcgcgtcggtagacattcccgggctcacgctgcgcggctcgtcacgcatgttgtttaattgtgcgcgcagagtagcggagagtttcggataattatcgataacttgctgatattgtttgatgcgctcaagggaaccttttcgttcctcaagcgcatttaaggcagactggagcgcctctacgacttccggctgtgcgggtttcgccgcttttgcctgctccagttcctgagtgatttgtttgctatcgggggccgtcgcggcgtacgccccccaactgaggcaccaggccatcagaaaagtgataatcaggcgcacgtcagcgtttcctttgatggattagacctggtcttttttgtcgtcaaccaatgggctggcgtcgtgttctgcttcgatctcttcagcaggaagcggggcaggttcagcgtctggcgtaacaaaggtttcggtagatactgccagcggctggccaattttcgtgacagacaggctttccagttgctcaaccagattcactttacccggtgcaaacaggttgataacggtggaaccgagtttaaagcgacccatttcctggcctttcagcagtgccacagaaccgtcgttttccccggcaggccaggtccagcgcttgatgataccttcgcgcggcggcgtaatggtgcccgcccagaccgtctcaatgctgccaacaatcgtcgctccgaccagaatctgcgccattgggccaaattcggtatcgaaaaggcaaatcacgcgttcgttacgggcaaacagattcggcacgttctgagccgtgagatggttaacggagaagagatcgcccggcacgtagatcatctcacgcagaataccgttgcacggcatgtgtacgcggtggtagtcacgcggggagaggtaagtggtcacaaacgtaccgttgcggaacaggtccgccatcagatagttgcctgccagcagggcttcgaggctgtagttgtggcctttggcttgcaggattttatcttcttcgattttacccaactggctgataacgccatcggcaggcatgaccagtacattcggatcggtatcgattgggcgtacttcgtcacgcagcggacggacaaagaattcgttaaaggtgcggtagctggcggtgtccggcttttgcgcctctttcatgtcgaccttgtagtatttaacgaacagatcgataaccagttttgtcagccatcctgcccgcttgcttgcgccccaacccgccaggcgagtaagccatagtttcggcagaatgtactgtaggctaagtttaaaactatttaacaaggtagcctccaggccattgttttgtcgttcctgatccggcctacatgccggatcctgaaaaaaaggggacgattctaacgacggttagcttaattgtcagtcatccgtatcagaaaagtttttacgcgtttttacctgcgccatgctttccagaatacggtgatagttttcgaaacgggtttccgcgattttcccttcctcaaccgcttcccggatagcgcagcccggatcggtatcgtgtttgcaatcgcgatatttacacagacctaaatagtcatggaattcgacaaagccctgagtgatttgttccggctccaggtgccagaggccgaactcacgcactcctggggagtcaatcacatcaccgccgtgcgggaagtgatacagccgagcggcggtcgtggtgtgctgaccgagcccgctgttgtcagagatatcgttggtcaggatctctttttgcagccccagcaacgcattcagcaggctggatttgccgacgccagactgcccggcaaaaatgctgatgcgcccggtcaacgcctcttccagcggttttagcccatcctgagtatggctggaaaccatcaatacgcgataaccgatattgcggtagatatccatctgctcgttgacgaacgccatgccttcgtcgtccagcaggtctatcttgttgagcacaataatcggctcaatctgcaaggtttcgcaggccaccaggtaacggtcgataatattgaggctcagctccggcaaaatggcggagacaatgacaatctggtcgatgttggcggcaataggttttacgccgtcgtagaaatccggacgcgtcaacacgctggtacgctcatgcaccgcttccacgatccctttgacatttacgccttccgccgccggtttacccggacgccagactacgcggtcgccggttaccaggctacggatggtacggcgaatattgcagcggtgaacgtcgccatcggcggattccacatcagcgtgcataccaaagcggctgatgacgataccttcatcaggctcgccaaacagattgtcgtcgtagtcgggcttctccttagacgttttaagacgacgctggtgattggcgttcacgcggcgctgctggcctttggagagtttatttttactcaatcgtacagactcctggtcgcccctgatgggcaaaacatctatgatacacgcaattgtggatcaatatagtcactgtgaatgggtggaaaatagcatgagtgccaatgaaaacaacctgatttggatcgatcttgagatgaccggtctggatcccgagcgcgatcgcattattgagattgccacgctggtgaccgatgccaacctgaatattctggcagaagggccgaccattgcagtacaccagtctgatgaacagctggcgctgatggatgactggaacgtgcgcacccataccgccagcgggctggtagagcgcgtgaaagcgagcacgatgggcgatcgggaagctgaactggcaacgctcgaatttttaaaacagtgggtgcctgcgggaaaaagcccgatttgcggtaacagcatcggtcaggaccgtcgtttcctgtttaaatacatgccggagctggaagcctacttccactaccgttatctcgatgtcagcaccctgaaagagctggcgcgccgctggaagccggaaattctggatggttttaccaagcaggggacgcatcaggcgatggatgatatccgtgaaagcgtggcggagctggcttactaccgcgagcattttatcaagctgtaaaatttttcctggtcacgtaagcgccggaatccacttgcggcggcgtgattttgacgctaaattgaacgtcttgctgataatttcagcacttgagataaaaacgcaaaaaaaacttttttggggggttgcagagggaaagatttctcgtataatgcgcctcccgtaacgacgcagaaatgcgaaaattacgaaagcaaaattaagtagtacgcgggaatagctcagttggtagagcacgaccttgccaaggtcggggtcgcgagttcgagtctcgtttcccgctccaaaatttgaaaagtgctgcaaagcacagaccacccaagcgggaatagctcagttggtagagcacgaccttgccaaggtcggggtcgcgagttcgagtctcgtttcccgctccaaaatttgaaagtgctgtaaggcacagaccacccaagcgggaatagctcagttggtagagcacgaccttgccaaggtcggggtcgcgagttcgagtctcgtttcccgctccaaattcttctctcaataaaatatccacagcgacgcgatgcgttattgctggtttttgttgtctctgacaaactcttgtaaacagagttatccacagcctcaggctgtaatcttaatttcaaagaaacttcgcacggtgaatagtatttttttaacctattgatagataagttaaaaattaagattccgttttgtcgagtcgatcacttgacgattttattcgtcttgaattgcaatgcgtttttatttttattcacaagctgtggatgaatcaggcgtcacgcggtaaccctttttcaatcacccgaaccagacgctgttttttcggcaattgcacttcgactatgcacgcatttcgtctctctatttgctgcgcaatcgcccacgctatgtgctcatcgagaagtgggtgctcacctttacgactttccagcgctgtcaaaatcgtttcatcccaaggggcattgcctaatgctacggcgatattacgcagccaacgcaggtgaccaatacgacgaatcgcgcttccttccgtgacttttaaaaacttctcttcgctccaggcgaataactcaatgagttccggtgcgtgtagcggcttacgcgggctgaaatcctcttctgtggtgagttgactatagcgattccacgggcagataagctggcagtcatcgcaaccgtaaatacggtttcccattaacggtcgcaactcttccgggatcgccccttcaagttcgatggtgagataagagatacagcggcgagcatcgacggtatatggctcgacgatggcaccggtcgggcaaatcgtcatacaggccacgcatttgccgcatccttcctcgactggttgatccacgggcagcggaatatcgaccagcaattcgcctaaaaagaagaagctaccggcctcgcgattgaggataagactgtgcttacctgtccagccgagcccagctttttcagctaacgggcgctcgagaataggcgcagaatcgacaaacggtctaaaattcaggctaacacaatgttgctgaatcatctcgcccagctttttgagtcggttgcgcagaagtttgtgatagtcacggcccagcgcataacggctaacatagccgagtttggggtttttcagcgtgctggcaaatgcggcgttagcaggaaggtaattcatccgcacgctgatcacgcgcagcgtaccgggcaataactcatgagggcgagcgcgcagcataccgtgacgtgccatccagtccatttcgccgtggtattgtttgtccagccatgcttgcagtttgggctcggactcgctgagatcggtatcggtaatacctacctgctgaaagcccagttccagcccccactgtttaattttttgcgctaactgattgagatcgaggggctcactcatgacggaccatacaatgaagaaaaaccccgtaagtataccacacaccgtctggtacgccgacgatatccgccgcggagaacgcgaggcggcagatgtgctggggctcacactctatgagctgatgcttcgcgctggcgaggccgcattccaggtgtgtcgtagcgcgtatcctgacgcccgccactggctggtgctgtgcggtcatggtaataacggcggcgatggctacgtggtcgcgcgactggccaaagcggtcggcattgaggtcacgttgttggcccaggagagcgacaaaccgttgccggaagaggccgcgctggcacgcgaagcatggttaaacgcgggtggcgagatccatgctagcaatattgtctggcccgaaagcgtagatctgattgttgatgcgctgctcggtaccggtttgcggcaagcgccccgcgaatccattagccagttaatcgaccacgctaattcccatcctgcgccgattgtggcggttgatatcccttccggcctgctggctgaaactggcgctacgccaggcgcggtgatcaacgccgatcacaccatcacttttattgcgctgaaaccaggcttgctcactggaaaagcgcgggatgttaccggacaactgcattttgacagtctggggctggatagttggctggcaggtcaggagacgaaaattcagcggtttagtgcagaacaactttctcactggctaaaaccgcgtcgcccgactagccataaaggcgatcacgggcggctggtaattatcggtggcgatcacggcacggcgggggctattcgtatgacgggggaagcggcgctgcgtgctggtgctggtttagtccgagtactgacccgcagtgaaaacattgcgccgctgctgactgcacgaccggaattgatggtgcatgaactgacgatggactctcttaccgaaagcctggaatgggccgatgtggtggtgattggtcccggtctgggccagcaagagtgggggaaaaaagcactgcaaaaagttgagaattttcgcaaaccgatgttgtgggatgccgatgcattgaacctgctggcaatcaatcccgataagcgtcacaatcgcgtgatcacgccgcatcctggcgaggccgcacggttgttaggctgttccgtcgctgaaattgaaagtgaccgcttacattacgccaaacgtctggtacaacgttatggcggcgtagcggtgctgaaaggtgccggaaccgtggtcgccgcccatcctgacgctttaggcattattgatgccggaaatgcaggcatggcgagcggcggcatgggcgatgtgctctctggtattattggcgcattgcttgggcaaaaactgagcccgtatgatgcagcctgtgcaggctgtgtcgcgcacggtgcggcagctgacgtactggcggcgcgttttggaacgcgcgggatgctggcaaccgatctcttttccacgctacagcgtattgttaacccggaagtgactgataaaaaccatgatgaaagcagtaattccgctccctgaataaggaagtgactgataaaaaccatgatgaatcgagtaattccgctccctgatgagcaggcaacattagacctgggcgagcgggtagcgaaagcctgcgatggcgcaaccgtaatctatctgtatggcgatttaggcgcaggtaaaaccacctttagccggggctttttacaggctctgggtcatcagggtaatgtcaaaagccccacttatacgctggtcgaaccctatacgctcgacaacttaatggtctatcactttgatttgtaccgccttgccgatcccgaggagctggagtttatggggatccgcgattattttgccaacgatgccatctgcctggtggagtggccacaacaaggtacaggtgttcttcctgacccggatgtcgaaatacacattgattatcaggcacaaggccgtgaggcgcgcgtgagtgcggtttcctctgcgggtgaattgttgctggcgcgtttagccggttaacctttgaaaggtggcgggatgatgtatcgcatcagaaattggttggtagcgacgctgctgctgctgtgcacgccggtgggtgccgcgacgctctctgatattcaggtttctaacggtaatcaacaggcgcggataacgttgagttttattggcgatcctgattatgcgtttagccatcaaagcaaacgcaccgtggcgctcgatatcaaacaaacgggcgtgattcagggactgccgttgttgttcagcggcaataatctggtgaaggcgattcgctctggaacgcctaaagatgcacaaacgctacggctggtggtcgatcttaccgaaaacggtaaaaccgaagcggtgaagcggcagaatggcagcaattacactgtcgtctttacgattaacgccgatgtgccgccaccgcctcctccgccgcccgtggttgcgaaacgcgttgaaacgcctgcggttgtcgcaccgcgcgtcagcgaaccggcgcgcaatccgtttaaaacggaaagtaaccgcactacgggtgttatcagcagtaatacggtaacgcgtccggcagcgcgcgcgacggctaacactggcgataaaattatcatcgctattgatgccggacacggcggtcaggaccctggcgctatcggccccggtggtacgcgggagaaaaatgtcaccatcgccatcgcgcgtaaattgcgtactttgctcaatgacgatccgatgtttaaaggcgttttaacccgtgacggggattactttatcagcgtgatggggcgcagtgatgtggcacgtaagcaaaacgccaatttcctcgtgagcattcacgctgatgccgcaccgaaccgcagtgcgactggcgcttccgtatgggtgctctctaaccgtcgcgccaacagtgaaatggccagctggctggagcagcacgagaaacagagcgagctgctgggtggggcgggtgatgtgctggcgaacagtcagtctgacccctatttaagccaggcggtgctggatttacagttcggtcattcccagcgggtagggtatgatgtagcgaccagtatgatcagtcagttgcaacgcattggcgaaatacataaacgtcgaccagaacacgccagccttggcgttctgcgcagcccggatatcccaagtgtactggtcgaaaccggttttatcagcaacaacagcgaagaacgtttgctggcgagcgacgattaccaacaacagctggcagaagccatttacaaaggcctgcgcaattacttccttgcgcatccgatgcaatctgcgccgcagggtgcaacggcacaaactgccagtacggtgacgacgccagatcgcacgctgccaaactaaggacgattgatgccaattcaggtcttaccgccacaactggcgaaccagattgccgcaggtgaggtggtcgagcgacctgcgagcgtagtcaaagaactagtggaaaacagcctcgatgcaggtgcgacgcgtatcgatattgatatcgaacgcggtggggcgaaacttatccgcattcgtgataacggctgcggtatcaaaaaagatgagctggcgctggcgctggctcgtcatgccaccagtaaaatcgcctctctggacgatctcgaagccattatcagcctgggctttcgcggtgaggcgctggcgagtatcagtagcgtttcccgcctgacgctcactagtcgcaccgcagaacagcaggaagcctggcaggcctatgccgaagggcgcgatatgaacgtgacggtaaaaccggcggcgcatcctgtggggacgacgctggaggtgctggatctgttctacaacaccccggcgcggcgcaaattcctgcgcaccgagaaaaccgaatttaaccacattgatgagatcatccgccgcattgcgctggcgcgtttcgacgtcacgatcaacctgagccataacggtaaaattgtgcgtcagtaccgcgcagtgccggaaggcgggcaaaaagaacggcgcttaggcgcgatttgcggcaccgcttttcttgaacaagcgctggcgattgaatggcaacacggcgatctcacgctacgcggctgggtggccgatccaaatcacaccacgcccgcactggcagaaattcagtattgctacgtgaacggtcgcatgatgcgcgatcgcctgatcaatcacgcgatccgccaggcctgcgaagacaaactgggggccgatcagcaaccggcatttgtgttgtatctggagatcgacccacatcaggtggacgtcaacgtgcaccccgccaaacacgaagtgcgtttccatcagagccgtctggtgcatgattttatctatcagggcgtgctgagcgtgctacaacagcaactggaaacgccgctaccgctggacgatgaaccccaacctgcaccgcgttccattccggaaaaccgcgtggcggcggggcgcaatcactttgcagaaccggcagctcgtgagccggtagctccgcgctacactcctgcgccagcaagtggcagtcgtccggctgccccctggccgaatgcgcagccaggctaccagaaacagcaaggtgaagtgtatcgccagcttttgcaaacgcccgcgccgatgcaaaaattaaaagcgccggaaccgcaggaacctgcacttgcggcgaacagtcagagttttggtcgggtactgactatcgtccattccgactgtgcgttgctggagcgcgacggcaacattagtcttttatccttgccagtggcagaacgttggctgcgtcaggcacaattgacgccgggtgaagcgcccgtttgcgcccagccgctgctgattccgttgcggctaaaagtttctgccgaagaaaaaagcgcattagaaaaagcgcagtctgccctggcggaattgggtattgatttccagagtgatgcacagcatgtgaccatcagggcagtgcctttacccttacgccaacaaaatttacaaatcttgattcctgaactgataggctacctggcgaagcagtccgtattcgaacctggcaatattgcgcagtggattgcacgaaatctgatgagcgaacatgcgcagtggagtatggcacaggccataaccctgctggcggacgtggaacggttatgtccgcaacttgtgaaaacgccgccgggtggtctgttacaatctgttgatttacatccggcgataaaagccctgaaagatgagtgatatcagtaaggcgagcctgcctaaggcgatttttttgatggggccgacggcctccggtaaaacggcgttagccattgagctgcgtaaaattttaccagtagagttgataagcgttgattctgcccttatttacaaagggatggatatcgggacggcgaagccgaacgctgaagagttactcgccgcgccgcaccgattgctggatattcgcgatccgagccaggcttacagcgctgctgattttcgccgcgatgcgctggcggaaatggccgatatcaccgcggcggggcggatcccactgttagtgggcggtacgatgttgtatttcaaggcattgctggaagggttgagcccgctaccgagcgcagacccggaagtacgggccagaattgagcaacaggcggcagagcaaggttgggagagtttgcatcgtcaacttcaggaggtagatccggttgcggcagcaaggattcatccaaatgatccacaaaggctttcccgggcactggaagtttttttcattagcggtaaaactttaacggaactgacgcaaacgagtggagacgctctaccgtatcaggtgcatcagttcgccatcgccccggcgagccgtgaactgctccatcaacgcattgagcagcgttttcatcagatgttggctagtggttttgaagcagaagtccgggcgctttttgcccgaggagatttgcatacggacttgccttccattcgttgcgtgggttatcgccagatgtggtcttaccttgaaggcgaaatcagttacgatgaaatggtttatcgaggtgtttgcgccacgagacagttggcgaagcggcagataacctggctgcgtggttgggaaggggttcactggcttgacagtgaaaaaccagaacaggcgcgtgacgaagtattacaggttgttggtgctatcgcaggctgaatgtgtacaattgagacgtatcgtgcgcaattttttcagaatcgaaaggttcaaagtacaaataagcatataaggaaaagagagaatggctaaggggcaatctttacaagatccgttcctgaacgcactgcgtcgggaacgtgttccagtttctatttatttggtgaatggtattaagctgcaagggcaaatcgagtcttttgatcagttcgtgatcctgttgaaaaacacggtcagccagatggtttacaagcacgcgatttctactgttgtcccgtctcgcccggtttctcatcacagtaacaacgccggtggcggtaccagcagtaactaccatcatggtagcagcgcgcagaatacttccgcgcaacaggacagcgaagaaaccgaataaggtttcgggctgtttttttacacggggagccagcgatcctgcgttccccgctgatctatttagagggttatacgcttgtttgaccgttatgatgctggtgagcaggcggtactggtacacatctattttacgcaagacaaagatatggaagacctccaggagtttgaatctctggtctcttccgccggtgtcgaagcattgcaggtgattaccggtagccgtaaagcgccgcacccaaagtattttgtaggtgaaggtaaagcagttgaaattgcggaagctgtcaaagcgacgggtgctagcgtcgttctttttgaccatgccctgagcccggcgcaagagcgtaacctggagcgtttgtgcgagtgtcgtgttatcgaccgcaccggccttattttagatattttcgcccaacgtgcgcgtacccatgagggtaagttgcaggttgagctggcgcagctgcgccatctggctacgcgcctggtgcgtggctggacccaccttgaaagacagaaaggcgggataggtttgcgtggtccgggtgaaacccagctcgaaaccgaccgtcgtttgttgcgtaatcgcatcgtgcagatacagagccgcctggaaagagttgaaaagcagcgtgagcaggggcggcaaagccgtatcaaagccgacgttcctactgttagcctggtgggatataccaacgccggtaaatctacccttttcaatcgcatcaccgaagcgcgggtctacgcggcagaccagttgtttgccaccctcgacccgacgttgcggcgtattgacgttgcagatgtcggtgaaaccgtacttgcagataccgtagggtttattcgccacctgccgcacgatctggtggcggcatttaaagccacgttacaagagacgcggcaagccacattactgctgcacgtcattgatgcggcggatgtgcgtgtacaagaaaacatcgaagcggtgaatacggttcttgaagagatcgacgctcacgagatcccaaccctgctggtgatgaacaagatcgatatgctggaagatttcgaaccgcgtattgatcgggacgaagagaacaaaccgaaccgtgtctggctttccgcacagaccggagcggggataccacagctttttcaggctttgacggagcggctttccggcgaggtggcgcagcatacattgcgtctgccaccgcaggaagggcgtctgagaagtcgtttttatcagcttcaggcaatagaaaaagagtggatggaggaggacggcagcgtaagtctgcaagttcgtatgccgatcgttgactggcgtcgcctctgtaaacaagaaccggcgttgatcgattacctgatctaacggcgtagcgtctgaagcgtggagtcatatcctctggcgtcgaaagacaacagggatcaccgcataacaaatatggagcacaaacatggcgtggaatcagcccggtaataacggacaagaccgcgacccgtggggaagcagcaaacctggcggcaactctgagggaaatggaaacaaaggcggtcgcgatcaagggccacctgatttagatgatatcttccgcaaactgagcaaaaagctcggtggtctgggcggcggtaaaggcaccggatctggcggtggcagtagtagccaaggcccgcgcccgcagcttggcggtcgtgtcgttaccatcgcagcggcagcgattgtcattatctgggcggccagtggtttctataccattaaagaagccgaacgcggcgtggtaacacgctttggtaaattcagccatctggttgagccgggtctgaactggaaaccgacgtttatcgacgaagtcaaaccggtgaacgtggaagccgtgcgtgaactggccgcttctggtgtgatgctgacgagcgacgagaacgtagtgcgcgttgagatgaacgtgcagtaccgcgtcaccaatccggaaaaatatctgtatagcgtgaccagcccggatgacagcctgcgtcaggctaccgacagcgccctgcgtggagttatcggtaaatacaccatggaccgcattctgacggaaggtcgtaccgtgattcgtagcgatactcagcgcgaactggaagagacgattcgtccgtatgacatgggtatcacgctgctggacgtcaacttccaggctgctcgtccgccggaagaagtaaaagcggcgtttgacgatgcgattgccgcgcgtgaaaacgaacagcaatacattcgtgaagcagaagcgtataccaacgaagttcagccgcgtgcgaacggtcaggcgcaacgtatcctcgaagaggcgcgtgcgtacaaggcccagaccatcctggaagctcagggtgaagtggcgcgctttgctaaacttctgccggaatataaagccgcgccggaaattactcgcgagcgtctgtatatcgagacgatggaaaaagtgttgggtaacacccgcaaagtgctggttaacgataaaggtggcaacctgatggttctgccgttagaccagatgctgaaaggtggtaacgcccctgcggcgaagagcgataacggtgccagcaatctgctgcgtctgccgccagcctcttcctccacaaccagtggagcaagcaacacgagctccaccagtcagggcgatattatggaccaacgccgcgccaacgcgcagcgtaacgactaccagcgtcagggggaataacgatgcgtaagagtgttatcgcgattatcatcatcgtgctggtagtgctttacatgtctgtctttgtcgtcaaagaaggtgagcgcggtattacgctgcgttttggtaaggtactgcgtgacgatgacaacaaacctctggtttatgagccgggtctgcatttcaagataccgttcattgaaacggtgaaaatgctcgacgcacgtattcagaccatggacaaccaggccgaccgctttgtgaccaaagagaagaaagacctgatcgtcgactcttacatcaaatggcgcatcagcgatttcagccgttactacctggcaacgggtggtggcgacattagccaagcggaagtgctgttgaaacgtaagttctctgaccgtctgcgttctgaaattggtcgcctggacgtgaaagatatcgtcaccgattcccgtggtcgtctgaccctcgaagtacgtgacgcgctgaactccggttctgcgggtacagaagatgaagttactaccccggcggcagataacgccattgccgaagcggcagagcgcgtaacggctgagacgaagggcaaagttccggtcatcaacccgaacagtatggcggcgctgggtattgaagttgtcgatgtgcgtatcaagcagatcaacctgccgaccgaagtgtctgaagcgatctacaaccgtatgcgcgccgagcgtgaagcggtagcgcgtcgtcaccgtagtcaaggtcaggaagaagcggaaaaactgcgcgcgactgccgactatgaagtgaccagaacgctggcagaagctgagcgtcagggccgcatcatgcgtggtgaaggcgatgccgaagcagccaaactgtttgctgatgcattcagtaaagatccggacttctacgcattcatccgtagcctgcgtgcttatgagaacagcttctctggcaatcaggacgtgatggtcatgagcccggatagcgatttcttccgctacatgaagacgccgacttccgcaacgcgttaatataacgactgcggtacaggtcaataaagccaccgcatcctcagggatgtcggtggttttctttttctataaggataatgaatgaatagcacaatctggctggcgcttgccctggttttggtactggaaggtttagggccgatgctttacccgaaggcatggaagaagatgatctctgcgatgaccaatttgcccgataatattttacgtcgttttggcggtggacttgtggttgcgggcgttgtggtctactacatgttgaggaaaacgattggctgaacaaaaaacagactgatcgaggtcatttttgagtgcaaaaagtgctgtaactctgaaaaagcgatggtagaatccatttttaagcaaacggtgattttgaaaaatgggtaacaacgtcgtcgtactgggcacccaatggggtgacgaaggtaaaggtaagatcgtcgatcttctgactgaacgggctaaatatgttgtacgctaccagggcggtcacaacgcaggccatactctcgtaatcaacggtgaaaaaaccgttctccatcttattccaagtggtattctccgcgagaatgtaaccagcatcatcggtaacggtgttgtgctgtctccggccgcgctgatgaaagagatgaaagaactggaagaccgtggcatccccgttcgtgagcgtctgctgctgtctgaagcatgtccgctgatccttgattatcacgttgcgctggataacgcgcgtgagaaagcgcgtggcgcgaaagcgatcggcaccaccggtcgtggtatcgggcctgcttatgaagataaagtagcacgtcgcggtctgcgtgttggcgaccttttcgacaaagaaaccttcgctgaaaaactgaaagaagtgatggaatatcacaacttccagttggttaactactacaaagctgaagcggttgattaccagaaagttctggatgatacgatggctgttgccgacatcctgacttctatggtggttgacgtttctgacctgctcgaccaggcgcgtcagcgtggcgatttcgtcatgtttgaaggtgcgcagggtacgctgctggatatcgaccacggtacttatccgtacgtaacttcttccaacaccactgctggtggcgtggcgaccggttccggcctgggcccgcgttatgttgattacgttctgggtatcctcaaagcttactccactcgtgtaggtgcaggtccgttcccgaccgaactgtttgatgaaactggcgagttcctctgcaagcagggtaacgaattcggcgcaactacggggcgtcgtcgtcgtaccggctggctggacaccgttgccgttcgtcgtgcggtacagctgaactccctgtctggcttctgcctgactaaactggacgttctggatggcctgaaagaggttaaactctgcgtggcttaccgtatgccggatggtcgcgaagtgactaccactccgctggcagctgacgactggaaaggtgtagagccgatttacgaaaccatgccgggctggtctgaatccaccttcggcgtgaaagatcgtagcggcctgccgcaggcggcgctgaactatatcaagcgtattgaagagctgactggtgtgccgatcgatatcatctctaccggtccggatcgtactgaaaccatgattctgcgcgacccgttcgacgcgtaattctggtacgcctggcagatattttgcctgccgggcgaacagtgtgatacattgctgtgtcgggtaagccattacgctatccgacacagtgttaaatcctcgcttttttccttccccgaactgaaataaattagcgacacagcttgtggctggtttatcatcaatataaatgtattttttcccgatttcccttttgaggttgatgtgcagttaacgagtttcactgattacggattacgtgcgctgatctacatggcgagtttgccagaagggcggatgaccagtatttctgaagtgactgacgtctacggcgtctcccgtaatcatatggtcaaaataatcaatcaacttagtcgtgccggctacgtgactgctgttcgtggaaaaaatggcggcattcgcctgggtaaaccggcgagtgcgatacgtattggtgatgtggtgcgcgagctggagcccttaagcctggtgaattgcagcagtgagttttgccacattacacctgcctgtaggttgaaacaggcactttctaaggccgtgcaaagttttcttacggaactggataactacacgcttgccgatttggttgaagagaatcaaccgctttataaattattgctggtggagtgacgaaaatcttcatcagagatgacaacggaggaaccgagatgagtcaagatcctttccaggaacgcgaagctgaaaaatacgcgaatcccatccctagtcgggaatttatcctcgaacatttaaccaaacgtgaaaaaccggccagccgtgatgagctggcggtagaactgcacattgaaggcgaagagcagcttgaaggcctgcgtcgccgcctgcgcgcgatggagcgcgatggtcaactggtcttcactcgtcgtcagtgctatgcgctgccggaacgcctcgacctggtgaaaggtaccgttattggccaccgtgatggctacggctttctgcgggttgaagggcgtaaagatgatttgtatctctccagcgagcagatgaaaacctgcattcatggcgatcaggtgctggctcagccgctgggtgctgaccgtaaaggtcgtcgtgaagcgcgtattgtccgcgtactggtgccaaaaaccagccagattgttggtcgctactttaccgaagcgggcgtcggctttgtggttcctgacgacagccgtctgagcttcgatatcttaatcccgcccgatcagatcatgggcgcgcggatgggctttgtggtcgtagtcgaactgactcagcgtccgactcgccgcaccaaagcggtgggtaaaatcgtcgaagtgctgggcgacaatatgggcaccggcatggcggttgatatcgctctgcgtacccatgaaattccgtacatctggccgcaggctgttgagcaacaggttgccgggctgaaagaagaagtgccggaagaagcaaaagcgggccgtgttgatctgcgcgatttaccgctggtcaccattgatggcgaagacgcccgtgactttgacgatgcagtttactgcgagaaaaaacgcggcggcggctggcgtttatgggtcgcgattgccgacgtcagctactatgtgcgtccgagtacgccgctggacagagaagcgcgtaaccgtggcacgagcgtgtacttccctagccaggttatcccgatgctgccggaagtgctctctaacggcctgtgtagcctcaacccgcaggtagaccgcctgtgtatggtgtgcgagatgacggttagcagcaaaggccgcctgacgggctacaaattctacgaagcggtgatgagctctcacgcgcgtctgacctacaccaaagtctggcatattctgcagggcgatcaggatctgcgcgagcagtacgccccgctggttaagcatctcgaagagttgcataacctctataaagtgctggataaagcccgtgaagaacgcggtgggatcagttttgagagcgaagaagcgaagttcattttcaacgctgaacgccgtattgaacgtatcgaacagacccagcgtaacgacgcgcacaaattaattgaagagtgcatgattctggcgaatatcagcgcggcgcgtttcgttgagaaagcgaaagaaccggcactgttccgtattcacgacaagccgagcaccgaagcgattacctctttccgtagtgtgctggcggagctggggctggaactgccgggcggtaacaagccggaaccgcgtgactacgcggagctgctggagagcgttgccgatcgtcctgatgcagaaatgctgcaaaccatgctgctgcgcagcatgaaacaggcgatttacgatccagaaaaccgtggtcactttggcctggcattgcagtcctatgcgcactttactagcccgattcgtcgttatccagacctgacgctgcaccgcgccattaaatatctgctggcgaaagagcaggggcatcagggcaacaccactgaaaccggcggctaccattatagcatggaagagatgctgcaactgggtcagcactgtagcatggcggaacgtcgtgccgacgaagcaacgcgcgatgtggctgactggctgaagtgtgacttcatgctcgaccaggtaggtaacgtctttaaaggcgtaatttccagcgtcactggctttggcttcttcgtccgtctggacgacttgttcattgatggtctggtccatgtctctagcctggacaatgactactatcgctttgaccaggtagggcaacgcctgatgggggaatccagcggccagacttatcgcctgggcgatcgcgtggaagttcgcgtcgaagcggttaatatggacgagcgcaaaatcgactttagcctgatctccagcgaacgcgcaccgcgcaacgtcggtaaaacggcgcgcgagaaagcgaaaaaaggcgatgcaggtaaaaaaggcggcaagcgtcgtcaggtcggtaaaaaggtaaactttgagccagacagcgccttccgcggtgagaaaaaaacgaagccgaaagcggcgaagaaagacgcgagaaaagcgaaaaagccaagcgcgaaaacgcagaaaatagctgcagcgaccaaagcgaagcgtgcggcgaagaaaaaagtggcagagtgatcaataccctctttaaaagaagagggttagattgctgacaaaatgcgctttgttcatgccggatgcggcgtgaacgccttatccggcctacataatcacgcaaattcaatatattgcagagatcatgtaggccggataaacgtagtgcatcaggcaaaacgtaaacaacgagtacattaatgagcgaaatgatttacggcatccacgcagtgcaggccctgctggagcgcgcccctgaacgttttcaggaagtctttattttaaaaggccgtgaagataaacgtctgttaccgctgattcacgcccttgagtctcagggcgtggttatccagttggcaaaccgccaatatctcgacgagaaaagcgacggtgccgtgcatcagggcattatcgcccgcgtgaagccaggacgtcagtatcaggaaaacgatctgccggatctgatcgctagcctcgatcaaccgttcctgctgatcctcgacggcgtaaccgatccgcacaacctcggcgcgtgcctgcgtagtgcggacgccgcaggcgttcatgcggtgattgtgccgaaagatcgctccgcacagctcaacgctacggcgaaaaaagtagcctgcggcgcggcagaaagcgttccgctgattcgggtgactaaccttgcgcgcaccatgcgtatgttgcaggaagagaatatctggatcgtcggtacggcaggcgaggcggatcatacactctatcagagcaaaatgaccggacgcctggcgctggtgatgggtgcggaaggtgaaggtatgcgtcgcctgactcgtgaacattgcgatgagttgatcagcatcccgatggctggaagcgtttcttccctgaacgttagcgttgcgaccggaatttgcttatttgaagcggtgcgccagcgcagctaatttctcagaattatgaaaagccatccagatttggatggtttttttttgtctatagctggtaagataattacgtattgcaaatattcattttattaatatttaaacttaatctatatggaataatatatgacatggaatccgttggcgctagcgacggcgctgcaaactgtacctgaacaaaatattgatgtaacaaatagcgagaacgcattaattattaaaatgaatgattatggcgatttgcaaatcaatattctttttacttcccgccaaatgattatcgaaacctttatttgtccggtgagtagtatcagcaatccagatgaatttaataccttcttattaagaaatcagaagatgatgccgttgagtagcgtagggatctccagcgtacaacaggaagagtattacattgttttcggggcgttaagccttaaatcttctcttgaagatatcctgcttgagataaccagcctggtagataacgcattggatctggctgaaattacagaagaatatagtcactaattacaaggacgggtatttatgggaattttaaaaagtttatttacgctggggaaaagctttatctcccaggcggaagaatccattgaagaaacccagggcgtgcgcatgctggaacagcatattcgtgacgctaaagctgaactcgataaagccggaaaatctcgcgttgatctgctggcgcgggtgaaattaagtcacgataagctgaaagatttacgtgagcgcaaagccagtctggaagcccgtgcgctggaagcgttaagcaagaacgttaatccgagcttgattaacgaagttgctgaagaaatcgcgcgccttgagaatctcattaccgctgaagagcaagtgttgagcaatctggaagtctcccgtgatggcgtggaaaaagcagttacagcgacagcgcagcgtatcgctcagtttgagcagcaaatggaagtcgttaaagccactgaagccatgcagcgtgcacaacaggctgtaacaacctctaccgttggcgcatcttccagcgttagcacagcggcagaatccttaaaacgcctgcaaacgcgtcaggccgaacgtcaggctcgcctggatgctgccgcacagttggagaaagtcgcagacggtcgcgaccttgacgaaaagctggcggaagccggaattggcggtagcaataaaagtagcgcccaggatgtattagcaagactgcaacgccaacagggcgagtaatttttttgccagcctcgctaaaaggctggcaactattttaaggataaaatatgtctggttttttccagcgtctgtttggcaaggataataagccagctatcgctcgtggtccgctgggacttcatctcaatagtggctttacgctcgacacgttagcgtttcgtttgctggaagatgaattgctgattgcgctgccgggtgaggaatttacggtagccgccgtcagccacatcgatctgggcggcggtagtcagattttccgctactacactagtggcgatgagtttctgcaaatcaataccaccggcggcgaagatattgatgacattgatgatatcaagctctttgtctatgaagagagctacggtatcagtaaagagagtcactggcgcgaggcgatcaacgccaaagcgatgggagcaatgaccttaaactggcaggaaaaacgctggcagcgattttttaacagcgaagaaccgggaaatatcgaacccgtctacatgctggaaaaagtagaaaatcaaaaccatgccaaatgggaggtccataattttaccatgggctaccaacggcaagtaaccgaagatacttacgaatatttgctgctaaatggtgaggaatcttttaacgatctcggcgagccagagtggttatttagccgcgcgttgggtgtcgatatcccgctgacaagtcttcatattattggttaattacaaggacgtttacaatgcatatactggatagtcttcttgcctttagcgcctatttttttattggcgtggctatggtgattatttttctgtttatctattctaaaattacaccgcacaacgaatggcagttaatcaaaaacaataataccgcggcgagtctggcgttcagcggtacattgttgggttacgttatccccttatccagtgcggcaatcaatgcggtgagtattccagactatttcgcctggggcgggattgcactggtgattcagttactcgtttttgctggtgtcagactttatatgcccgcattaagcgaaaaaattattaatcacaataccgcagcaggaatgtttatgggaaccgccgcgctggctggcggtatttttaacgcagcttgtatgacatggtaatggacgatcatggccagaaaacgcaaaagtagaaataacagtaaaattggtcacggagcgattagtcgcattggtagaccgaataatccttttgaaccgtgccgcaatcgctacgcacaaaaatacttaacgttggcgctaatgggcggtgccgcttttttcgtattgaaaggttgtagcgatagtagcgatgtcgataacgacggcgacggaacgttttacgcgacagtgcaggattgtattgatgacggtaataatgccgacatttgcgcgcgtggctggaacaacgccaaaacggcattttatgccgatgttccgaagaatatgactcagcagaactgtcagtctaagtacgaaaattgctactacgacaatgttgaacagagttggatcccggtcgtttctggatttttgttaagccgggttattcgtaaagatcgcgatgagccgtttgtttataacagcggcggttcctcttttgctagccgcccagtctggcgcagcacttctggtgattactcctggcgctccggttctggcaaaaaagagtcttactctagcggcggctttaccaccaaaaaagcgtctaccgtttctcgcggcggctatggtcgttcttccagcgcccgtgggcattggggaggctaatcatgctgagacacaacgttcctgtgcgacgggatctggaccagatcgccgctgacaacggtttcgactttcatatcatcgacaatgaaatctattgggatgagagtcgggcttaccgttttactctgcgccagattgaagagcagatcgaaaaaccgactgcggaactgcatcagatgtgccttgaggtggtggatcgcgcggtaaaagatgaagagatcctgacgcaactggcgatcccgccgttgtactgggatgtgatcgctgaaagctggcgcgcccgcgatcctagcctgtatggacggatggattttgcctggtgtggcaatgcgccggtgaagctgctggagtacaacgccgatacgccaactagtttgtacgagagcgcttattcccagtggctgtggctggaggatgcccggcgcagcggcattattccgcgtgatgccgatcagtacaatgctattcaggaacgcctgattagtcgctttagcgagctttacagtcgggaaccgttttatttttgctgctgtcaggacaccgatgaagacaggagtaccgtgctgtacttgcaggactgcgcccagcaggcagggcaggagagccggtttatctacattgaagatctcggtttgggcgtcggcggcgtactgaccgatcttgatgataatgtcatccagcgtgcatttaagctgtatccgctggagtggatgatgcgtgacgataacggtccgctgctgcgcaagcgtcgcgagcaatgggtggagccgttatggaaaagtatcttgagtaataaagggctaatgccgctgctttggcgcttcttccctggtcatcctaatcttcttgcgtcctggttcgatggcgagaaaccgcagattgccgctggcgaaagctatgtgcgtaaaccaatctatagccgcgaaggcggcaacgtcaccatttttgacggcaagaataacgttgttgaccacgctgatggtgattacgccgatgaaccgatgatctaccaggcgtttcaacctctgccgcggtttggcgatagctacacactcatcggtagctggattgtcgatgatgaagcgtgcggaatggggatccgtgaagataacacactgatcaccaaagacaccagtcgtttcgttccgcattacattgctggataagaatgttttagcaatctctttctgtcatgaatccatggcagtgaccatactaatggtgactgccattgatggagggagacacagtgcactggcaaactcacaccgtttttaatcaacctataccattaaataacagcaacttatacctgtctgatggcgcgctctgcgaagcggtaacgcgtgaaggtgctggctgggatagcgattttctagccagtattggtcagcagttaggaacggctgaatcccttgaactggggcggctggcgaatgtgaatccgcctgaattattgcgctacgatgcgcaaggacgccgtctggacgatgtgcgttttcaccccgcctggcacctgctgatgcaggcgctatgtaccaatcgggtgcacaatcttgcctgggaagaagacgctcgctccggcgcatttgtggcgcgcgcggcgcgttttatgttacatgcgcaggttgaggcagggagcttatgtccgataaccatgacctttgccgccacgccattgttgttacagatgttacccgcgccgtttcaggactggaccacgccgctattgagcgatcgctacgattctcacttattgccaggtgggcaaaaacgcggtttgttgattggcatgggaatgacggaaaagcagggcggttccgatgttatgagcaacaccacccgtgcagagcgtctggaagatggctcttatcggctggtggggcataaatggtttttcagcgttccgcaaagcgatgcgcatctggtgctggcgcagaccgcgggtggtctgtcctgcttttttgtgccgcgctttttgcctgacgggcaacgcaacgcgattcgcctcgagcggctgaaagataagctgggtaatcgctctaacgccagttgcgaagtggagtttcaggatgccattggttggttgttggggctggaaggggaaggaattcgtctgatcctgaaaatgggtgggatgacgcgttttgattgcgccctgggtagccatgccatgatgcgccgtgcatttagcctggcgatttatcatgcacatcaacgccatgtttttggtaatccattgatccaacagccccttatgcgtcatgtcttaagtcgcatggcacttcagcttgaagggcaaacggcgttgctgtttcgtcttgcgcgagcgtgggaccggcgtgccgatgccaaagaagccctgtgggcgcgtttatttacgcctgcggcaaaatttgtgatctgcaaaagaggtatgccgtttgtggccgaagcgatggaggtgctgggcggcattggttattgcgaggagagtgagctgccgcggctttaccgggagatgccggtaaacagtatttgggaaggttccggcaatattatgtgcctggatgtgttgcgcgttctcaataagcaagcgggcgtatacgacttattgagcgaagcatttgtggaagtgaaagggcaggatcgctattttgatcgcgcggttcgtcgtttacagcagcagctgcgtaagccagctgaagaactggggcgagagattactcatcagctattcctgctgggctgcggtgcgcaaatgttgaaatatgcttctccgccaatggcgcaggcgtggtgtcaggtgatgttagatacgcgcggcggcgtacggttgagtgagcagatccagaatgatttattgctgcgggcgacggggggagtgtgtgtgtaagcgtatacgactgatgcgacgctggtttcgattaactaaatgaaatatgtgaaaattgtaggccggacaaggcgctcgcgccgcatccggcattgttcatttgctgtagatgacactcatgcatacagtatcgcctgtacgcgccagttatcaggctgctggtcttcgtacatggtaataatgcggtaccaactcgcaccttgttcatcggcctttaacgccacgatacgttccacgtcctgcggatccccactaatattgctaacactgatctgacctatttcattcaggcccgtcacgcagtcagcactggcgaattctgcagactgtgccgtggcgctcgcaggataagtcactaattgcaggctgggactggcaagtaattgtttcatcgtcagctccatttttcgtttccccacatgttgcagggcattccatcgcggtaataaacgcccaggcttccagccggtaatttattgtgcacaggtaaacgcatagggacgcaaagcaatgtaaagctgactatgtaagttgtctgatttatttacggtacaaaatggcttgactataccactgtcctgtcacgatggtttcgtccaccatgacgacaacgtaataatcagcttttgcagcgacagctttcgctttgatttctgctaatgcgtcatccggagaaccccgaaccatcgtgcttacgctacctattcgctgtaacccttgcgtctggtcgcggcgaatctcttgcggatggtccgttactggcggtgctggctgtggcgtaccttgcagtgcgctacaggcacttaacatcaacaccaataataaactggcaaaccggtaaataacgctattacgtttcctgctaaccatagtgtagtgccttattaatttaactttgggggaatgttcccgaattgttacctggtacgcgattttcgaatgaaaacgtgacgaaagcgtaacccacatctcaacattatgaactaataccgccagcagaaacttgtgctaaggatttcttcatgtcataccagacaaaaaggagagacagatgattgaaatagaaagtcgcgagctggcagatattcccgttcttcatgcttatcctgtcgggcaaaaagataccccgttaccgtgcgtaattttttatcacggctttactagttccagtctggtgtatagctattttgccgttgcgctggcgcaggctggtttgcgggtgatcatgccggatgcgcccgatcacggtagccgttttagtggtgacgcagcgcggcggttaaatcaattctggcaaatcttgctacaaagtatgcaggaattcactactttacgtgcggcaatagccgaagaaaactggctgcttgatgaccgtctggcagtcggtggcgcgagcatgggcgcgatgacggcactggggattaccgctcgccaccccacggtgagatgtaccgccagcatgatgggaagcggctattttacaagtctcgcccgtagtctgtttccaccgctgatacctgaaacggcagcacagcagaatgaattcaataacattgtcgcgccactggcagagtgggaagcgacaaaccacctggaacaacttagtgacagacctctactgctgtggcatggcctcgacgatgacgttgtgcctgccgacgaaagtctacgtttgcagcaggccttaagcgagacgggacgggataaactgctaacctgtagttggcagccaggcgtgcgtcaccgcattacgcctgaggcgttagatgctgccgtgacatttttccgccagcatctttaaacacgcagaatgctgaccccttgcgcttccagttgttgcaggatttccgggttagcatttttgccggtgataagcatatcgatttgatcggcacggctaaaaagcattcccgcgcgttcgccaatcttactgctatcaaccagtaccaccagtttccctaccacgctcagcatcttctgctctgccattgctgtcagcatatcggttttatacaacccttctgcggtcagcccttttccgctggtaaacatccagtgcccggcatagagactgttttcgctgccctgcgggcttaaagtgatggactgacttttgttgtactgtccgcccataatgatcacgctgtcatgttcttgatcgatcaggtaatttgccagcggtagataattagtgatgatttgcactggcttgccacacatttcccgcccaagcagaaacgcggtggagccgcagttgatgactacgctttcgcccggattaaccagctggctggccgctttagcgatacgtactttttcatcgtgattctgcgcctgatgcagattcatcggcgtccagcgcgggcgctgttgggtaatagcttctgcgccattgcgcacttttttcagtttgccgctttcgtcaagtttattgatatcgcgtcgcgcagtggcagggctaattcccagacgctcaacgactttctcaacggtcacaaagcccaattgtgcgagcatttccaggaggatttgatgtctttgtgcttcagtcatgagctattccgataaaatttgatttttttagatgatatttgaaatagccaggaaatactacgccggatagcgcgaacttctccacgctacccggtataaacgacagattacaggaaactcttgaacggcagatccggttcaatagtgaagcaatcatcgaaaccgcgcggatagtggtactcgaagttgtctttatccagcggccaggtaaatttgccacccacctgccagataaacggcttgaagccatacttcaggcgatcttttttcatctcccacagcacgcggatctcttgcggatcggcctggaagttactccagatatcgtggtggaacgggatcactactttcgcattcagcgcttcacccatacgcagcatatcggcgctggtcattttgtcggtgataccgcgcgggttttcgccgtagcttcctaacgccacgtcgatctgatgttcgttaccgtgcttcgcataatagttagagtagtgggagtcgccgctgtgatacagggagccgccaggcgttttgaacaggtagttcaccgcgcgatcgtccatgccatctggcagtacgccagccgctttttgatcggcaggcagggtgatcagtgcagtacggtcgaaagcatcaagcgcatgaatttcaatgtctttcacttttactacatcgcccggtttgaccacgatgcaacgctctttcggtacgccccagccaatccacaaatccacacaggttttcggtccgataaacggtacgtcatctgcacaattctgcatcacggcagcagcgacgttaacgtcgatatgatcgttgtgatcgtgagtcgccagtaccgcgtcgatctggcgaatcgcaaacggatcaagaacaaacggggtggtacgcaggtttggctgcagttttttcacgccagccatgcgctgcatctggtgaccctgtttcattaacgggttaccgtgactttgtttgccagtgccgcaccagaaatcaacgcaaacgttggtgccaccttcgcttttcaaccagatcccggtgcagccaagccaccacatcgcaaatgtgccaggagcgacctgttcttgttcaatttcttcattcaaccagctaccccactccgggaaagtgctcaggatccaggattcacgggtgatacttttcactttactcatcgccatttaccttcatgatagttcaattcgaatcaatatgtgattggttttgattaatcctgacactattttttcaggaaggcaatgaccattttttgactttttgccagggaagttgttgttgattttgagtatggaaagatttaatggaatgtgtaattcaattaactaaatgaatttaaatggataattgtttcgttgtgtgaatcccactctatccatgtggaattatttgcgggtcgcgtcacatttaatcataaataatcttgttgtgattacttttgaaaattagagtgagtgcacaacattccgggtgtgtggaatacccggttacctcttcttcaggagatcgttatggagatcctctacaacatctttaccgtgttttttaaccaggtcatgaccaatgccccgttgttgctgggtattgtgacctgtctgggctacatcctactgcgcaaaagtgtcagcgttattattaaaggcacgattaaaaccataattggtttcatgttgttgcaggcagggtccggcatcctcaccagcaccttcaaaccggtggtggcgaaaatgtccgaagtctacggcattaacggcgcaatttccgatacctacgctagtatgatggcaaccatcgaccgcatgggcgatgcctatagctgggtgggttacgccgtattgttagcgctggcgctgaacatctgttacgtgctgttgcgtcgcattaccggcattcgcacaatcatgttgaccggccacatcatgttccagcaggccgggttgattgccgttacgctgtttatcttcggctactccatgtggaccaccattatctgtaccgcgattctggttagcctctactggggcatcacttccaacatgatgtacaagccgactcaggaagtgacggatggctgtggtttctccatcggtcaccagcagcagtttgcaagttggattgcctataaagtcgcgccgttcctcggcaaaaaagaggagagcgttgaagacctcaaattgccgggctggctgaacattttccacgacaacatcgtctccacggcgattgtgatgaccatcttctttggtgccattctgctctccttcggtatcgacaccgtgcaggcgatggcaggcaaagtgcactggacggtgtacatcctgcaaactggtttctcctttgcggtggcgatcttcatcatcacgcagggtgtgcgcatgtttgtggcggaactctctgaagcatttaacggcatttcccagcgcctgatcccaggtgcggttctggcgattgactgtgcagctatctatagcttcgcgccgaacgccgtggtctggggctttatgtggggcaccatcggtcagctgattgcggttggcatcctggtcgcctgcggctccagcatcctgattattcctggctttatcccgatgttcttctctaacgccaccatcggcgtgttcgctaaccacttcggcggctggcgtgcggcgctgaagatttgtctggtgatggggatgatcgaaatctttggttgcgtctgggcggtgaaactcaccggtatgagtgcctggatgggcatggcggactggagcattctggcaccgccgatgatgcaaggcttcttctccatcggtatcgcctttatggccgtcatcattgtaattgcactggcttatatgttcttcgctggccgcgcgctgcgcgcagaagaagatgcagaaaaacaactggcagaacagtctgcttaataaggagttttgattatgaccgtacgtattctggttgtgtgtggcaacggacaaggcagttccatgatcatgaagatgaaagtggaccagtttttaacccaaagtaacattgaccatacggtaaacagctgcgcggttggcgagtacaaaagcgagttgagtggcgcggatatcatcatcgcttctacgcacattgcgggcgaaatcaccgtgaccggcaacaaatacgtggttggcgtgcgcaacatgctctctcctgccgactttggcccgaaactgctggaagtgatcaaagagcatttcccgcaggatgtgaagtaaggacgcgccatgaaattacgtgatagcctggcggaaaataaatccatccgcctgcaggctgaagcagagacatggcaggaagcggtgaaaatcggcgttgacctgctggtggcggcagatgtggtagagccgcgttactaccaggcgattctggatggcgttgaacagttcggtccttatttcgttatcgctccgggcctggcaatgccgcacgggcgtccggaagagggcgttaagaaaaccggtttctctctggtaacgctgaaaaagccgctggagttcaaccacgatgacaacgatccggtggatatcctcatcaccatggcggcggtcgatgccaatactcaccaggaagtgggcatcatgcagatcgtcaacctgtttgaagatgaagagaattttgaccgtttacgcgcctgccgtaccgagcaggaagtactggatctcattgaccgcaccaacgcggcagcttaagaaggaattgaacatgagtttaccgatgttgcaagtcgcgctggacaaccagactatggatagcgcctacgaaaccactcgcctgattgccgaagaagtcgacattatcgaagtgggcaccattctgtgcgtgggcgaaggcgtgcgtgcggttcgtgacctgaaagcgctctacccgcacaaaatcgtactggcagacgccaaaattgccgatgcaggcaaaatccttagccgtatgtgcttcgaagccaacgctgactgggtgacggtaatttgctgtgcggatatcaacaccgccaaaggcgcgctggacgtggcaaaagagtttaacggcgacgtgcagatcgaactgaccggttactggacctgggaacaggcgcaacagtggcgcgatgcaggcattgggcaggtggtttatcaccgcagccgtgacgcgcaggccgcaggcgtggcgtggggcgaagcggacatcaccgcgatcaaacgtctttccgatatgggcttcaaagtcaccgtcaccggaggcctggcgctggaagatctgccgctgttcaagggtattccgattcacgtctttatcgcgggccgtagtatccgtgatgccgcttctccggtggaagccgcacgtcagttcaaacgttccatcgctgaactgtggggctaaggagcggatatgttgtccaaacaaatcccgcttggcatctatgaaaaagcgctccccgccggggagtgctggctggaacgcctgcaactggcaaaaacgttaggcttcgattttgtcgaaatgagcgtagatgaaactgacgatcgcctgagccgcctcaactggagccgcgagcagcgtctggcgctggtcaatgcgattgttgaaaccggcgtgcgcgtgccgtccatgtgcctttctgctcatcgtcgtttcccgctgggcagtgaagatgacgcggtgcgggcgcaggggctggagattatgcgtaaagctatccagttcgcccaggatgtcggtattcgcgtgatccagctggcgggctatgacgtttactatcaggaagccaataacgaaacgcgtcgtcgtttccgtgacggcctgaaagagagcgttgagatggcaagccgcgcgcaggtgacgctggcgatggagatcatggattatccgttgatgagctccatcagcaaggcgctgggatacgcgcactatctcaacaatccgtggttccagctctacccggatatcggcaacctgagcgcgtgggacaacgatgtgcagatggagttgcaggccggaatcgggcatatcgtcgcggtacatgtgaaagacaccaaacctggcgtcttcaaaaacgtgccgtttggcgaaggtgtagtggatttcgagcgttgtttcgaaacgctcaaacagagtggctattgcgggccgtacctgattgagatgtggagcgaaacggcggaagacccggcggcagaagtggcgaaagcgcgtgattgggtgaaagcgcgcatggcgaaagcgggcatggtggaggcggcataatgcaaaagctaaaacagcaggtatttgaagccaacatggagctgccgcgctacgggctggtgacctttacctggggcaacgtcagcgctatcgaccgcgaacgcgggctggtggtgatcaagcccagcggcgttgcctacgaaaccatgaaagcggccgatatggtggtggttgatatgagcggcaaggtggtggaaggggagtatcgcccatcttccgacactgcgacgcatctcgaactctaccgtcgttacccgagccttggtggcattgtccatacccactccactcatgccaccgcatgggcgcaggcggggctggcgatcccggcgttaggcaccacgcacgccgactacttctttggcgacattccgtgtacgcgcgggttaagcgaagaagaggtgcagggcgagtatgaactgaacaccggcaaagtgattatcgaaacgctgggcaacgccgagccgctgcatacgccgggaattgtggtgtatcagcacgggccgttcgcctgggggaaagatgctcacgatgcggtgcataacgcggtggtgatggaagaagtggcgaaaatggcgtggattgcccgcggcattaacccacaactcaatcacatcgacagcttcctgatgaataaacacttcatgcgtaaacacggtcctaacgcttattacgggcagaagtaaaacacgcgctgcggaaatttccttcctcgggagataactggtctaattccgcagccgtttttcaaaaaaaagccccctgcgaagggggcaaagcaaactatggcaatgtttcgttggttatacctggtgttagcgataaatatccgcgctggcgtgcatattgccgttactccccggttcccgcatcagaattacgtggtagtacgttgcgccttgcgcatctgtttcttcatttaatgcctgacgtgcttcgctttcagtggcgaaattatgattgatataaatcacgcctaagctttgcacatcgtccatatttctggcctggtggttattaatttcaatggctgcccatgtatttgcacttagcaaaagcacagccagaagggctaaaacacgactgaacatagatacctcctcgacggctgactttgtgtgctctcctctgtgatgatcttctgatttaattttaatcaatgataaagaagttgatggtgaccatttctgatgcagttgttcaaaaaaacaccatgatgaagtgtgatgaacttcaaatcagcgtgttagaggttaattgcgaaaggggagatttatttcggctctgcccttgagtttagcgaggcatacaagtactataacgcgtcatttttcagccgacctttaacacgttccttgcctccccgggattcggctgacccagacaggaggctgaataatccgtaaggagcaattcgatgcgtcattacgaaatcgtttttatggtccatcctgaccagagcgaacaggttccgggcatgatcgagcgctacactgctgccatcactggtgcagaaggcaagatccaccgtctggaagactggggccgccgtcagctggcttacccgatcaacaaactgcacaaagcacactacgttctgatgaatgttgaagctccgcaggaagtgatcgatgagctggaaactaccttccgcttcaacgatgccgttatccgcagcatggttatgcgtaccaagcacgctgttaccgaagcatctccgatggttaaagcgaaagacgagcgccgtgagcgtcgcgatgatttcgcaaacgaaaccgctgatgatgctgaagctggggattctgaagagtaatttctgatgaccaaccgtctggtgttgtccggcaccgtgtgcagggctccccttcgaaaggtcagtccaagtggaattcctcactgccagttcgtgcttgagcatcgttctgtgcaggaggaagccggctttcaccggcaggcgtggtgtcaaatgcccgttattgttagcggacacgaaaaccaggccattactcacagtataacggtcggcagtcgcataaccgttcaggggttcattagttgccacaaggcaaagaacggactgagcaaaatggttttgcatgccgagcagattgaattgatagattctggagactaaccatatggcacgttatttccgtcgtcgcaagttctgccgtttcaccgcggaaggcgttcaagagatcgactataaagatatcgctacgctgaaaaactacatcaccgaaagcggtaagattgtcccaagccgtatcaccggtacccgtgcaaaataccagcgtcagctggctcgcgctatcaaacgcgctcgctacctgtccctgctgccgtacactgatcgccatcagtaatcggtcacggtccattaatacgactttgagaggataaggtaatgcaagttattctgcttgataaagtagcaaacctgggtagcctgggtgatcaggtaaacgttaaagcgggctatgctcgtaacttcctggtaccgcagggtaaagctgttccagctaccaagaaaaacattgaattcttcgaagctcgtcgcgctgaactggaagctaaactggctgaagttctggcagctgctaatgctcgcgctgagaaaatcaatgcactggaaactgttaccatcgcgtctaaagctggcgacgaaggtaaactgttcggttccatcggtactcgcgacatcgctgacgctgtaactgcagctggcgttgaagtggctaagagcgaagttcatctgccgaacggcgttctgcgtaccactggcgaacacgaagtgagcttccaggttcacagcgaagtattcgcgaaagtgatcgtaaacgtagtagctgaataattcgttattcaacgagacgtaaaaacgccgaccattggtcggcgttttgctttctatttttcgtcaggtattagtttcgcaagtagatccattcaccattctcttgtgtccataagtcaggatggtttgctggcgttagatacatacgagcgcaactgatgtctcgctcctgcggcactcgctcgaaacccaaaccgctgtagattgcggcactactacttaaggaacgcagaccaattttcaaatcatggggtaaatcagaatacgcgtttagcaatgcagcaatgatgaatccgagggcattagaaacgcctgtaacagtgcgaagttggtcgatataaagatcgattgttggtagttcagaactccagcaattaggcatttgggcaggaagggttacaacgtatcctatcgtttggccggtatagtctggagtaccataaccaggtcccaaaaccacttcgtgtattgtgtatttactgttgggttcgaaggattcgacatcttgcaataaatatttcagttctgcggttaacctcgcacccgcgtaagctttattgtatttctgggcgtgaatattatctaatgtagcttcatggttccatccaaaagaattatcaccattcattgtgattccatcgtaagcattacacctcgtcgctaacttattgaatgcttgccagtcactgagatctagtttgtggatctcaacagtacgtctgccatcgcaattatgatctcttccacgattactaagtaatgtagcgcgtgcgtattgatgaaattttaattttactggtttgtcggtggagctaaaacgagataaatatgcaggaaaactataaatagtcgttggtaatgtcattgtaatgttacctgtttaatgtttttataaatatcgcagctgaatgttcacagaaaaaaatcgatattaataaaaataagtttgttttctgaagtggtgaaaatagcggatggtgaaagatattaatatcaaaaatcgctcattatggatataacgatgcacccggggagaaaatgacttccacgccttacaccgtacattcttgttgtgcggtatgtaattattctacgctgtcggtatcggtgtattcgttaatcagcaggttagccagccacaaaaagccattgagaaaattattgattttacatgggattattatattgctaatccttggtttttaaaaattgtgcatagtgaaaatcaaagtaaaggtgtgcattatgcaaaaagtcagcgtctcttagaaattaaccatgcgcacttgcagttaatggaatccttattggatgaagggaagaaacacaatatttttaagccagatatcgacccattgcaggtgaatattaatattgctgcgcttggcggatattatttgatcaaccagcatacgcttggcctggtttatcacatcagtatggttagtccccaggcactggaagccagacgtaaggtcatcaaagagacaatccttagctggcttttggttgaccctagttctaccgcgcacgaataattaccgcgcacgaataaaactgccatccggctggcgggtgaacaggacctgttgattattccccgtatcaatggttaagcccgtcaccacgccgctggcgttctggcggattttcaccatctgcccgttttgcaaattactcagcggcttacccgcgccttctacctgcgccattgcatagacatcggtagcgggcagtccgtggtcgcggaacagctgcgccatcgttttaccgggttcgacacggtaagagcgccattgattatcaattccgctatctggctggaatggttgcgtttgggtagtttgcggctgctcttctggctggccttcctgtataggttctggagcgaccggagccacctgatcaggaccattttgtggggtaactaattgcgcccgcagctgttcttctgtcggcggttgactttggctctgaatatctaactgcgcttcacgcgtcaccaccggcgcgttgggcgtatcatcagatggaagcagaaatccgaccaccaatacaatggcggcaataatgatcccccgacgatgcatcggcggcagcgggtccatgaagcgaaaattgtccggcgcgtgccagactttctccagggttggttttagttcaaagcgcccgggcatggtttcctcctgctccgcgtcttgttcctcaatcatagcctatgaataagctaacgctatgatgtccgtggtaaacccgcctttattatattcatacgggatattgctattgtttctttttccctgggatttgtcatcattcccgcgacaaagttttacccaaagaagtgtggctgatatgctgcccgctactttataccctaagaaaggaaatacgatgaccaccccaacttttgacaccatcgaagcgcaagcaagctacggcattggtttgcaggtagggcaacaactgagtgaatctggcctggaagggctgctgccagaagcactggttgcaggtattgccgatgcgctggaaggcaaacatccggctgttccggttgatgtggtgcatcgcgcgctgcgtgaaatccacgagcgcgccgatgccgttcgtcgtcagcgtttccaggcgatggctgctgaaggtgtgaaatacctggaagaaaacgccaaaaaaagaaggtgtgaatagcaccgaatctggcctgcaattccgcgtgatcaaccagggtgaaggcgcaattccggcacgtaccgaccgcgttcgtgttcattacaccggtaaactgatcgacggcaccgtgtttgacagctccgttgctcgtggtgaacccgctgaattcccggttaatggcgtgatccctggctggattgaagcactgactctgatgccggtaggttctaaatgggaactgactatcccgcaggaactggcatatggcgagcgcggcgcaggcgcatccatccctccgttcagcaccctggtgtttgaagtcgaactgctggaaatcctctaagcagcgcattctgttcccctcgaacgagaggggagcaggcattcagcaataaacccttcagtttgccaaacggcgctattttgtgttgcaaagaccccgtaagcgtgtatttttgtgagctgtttcgcgttatcaccgtgatatgacactcactttaaacataaaattaacattagatctaaatcttagtattcatcccgcgtattgttacctaatatcgatgagtcccgatacagattcgtcgtatcatagactgactaaaggccgtagagcctgaacaacacagacaggtacaggaagaaaaaaacatggtagatcaggtaaaagtcgttgccgatgatcaggctccggctgaacagagcctacggcgcaatctcacaaaccgacatattcagcttattgccattggcggtgccattggtacggggttgtttatggggtctggcaaaacgattagccttgccgggccgagcatcattttcgtttatatgatcattggttttatgctctttttcgtgatgcgggcaatgggggaattgctgcttagcaatctggaatacaaatcttttagtgacttcgcttccgatttactcgggccgtgggcaggatatttcaccggctggacttactggttctgctgggttgtaaccggtatggcagacgtggtggcgatcacggcttatgctcagttctggttccccgatctctccgactgggtcgccagcctggcggtgatagtgctgctgctgacgctcaatctcgccaccgtgaaaatgttcggtgagatggagttctggtttgcgatgatcaaaatcgtcgccattgtgagcctgattgtcgtcggcctggtcatggtggcgatgcactttcagagtccgactggtgtggaagcgagtttcgcgcatttgtggaatgacggcggctggttcccgaaaggtttaagtggcttctttgccggattccagatagcggttttcgctttcgtggggattgagctggtaggtacaacagctgcggaaaccaaagatccagagaaaagtctgccacgcgcgattaactccattccgatccgtatcattatgttctacgtcttcgcgctgattgtgattatgtccgtgacgccgtggagtagcgtagtcccggagaaaagcccgtttgttgaactgttcgtgttggtagggctgcctgctgccgcaagcgtgatcaactttgtggtgctgacctctgcggcgtcttccgctaacagcggcgtcttctctaccagccgtatgctgtttggtctggcgcaggaaggtgtggcaccgaaagcgttcgctaaactttctaagcgcgcagtacccgcgaaagggctgacgttcagctgtatctgtctgctcggcggcgtggtgatgttgtatgtgaatcctagtgtgattggcgcgttcacgatgattacaaccgtttccgcgattctgtttatgttcgtctggacgattatcctttgcagctaccttgtgtatcgcaaacagcgtcctcatctacatgagaagagcatctacaagatgccgctcggcaagctgatgtgctgggtatgtatggcgttctttgtgttcgtggtcgtgttgctgacactggaagatgacactcgccaggcgctgctggttaccccgctgtggtttatcgcgctggggttgggctggctgtttattggtaagaagcgggctgctgaactgcggaaataaccgcattatcatgctggatggcgcaatgccatccagcttttagatcactcacccgccagcgcgcgtgggaacagtacattgttttccagactgatgtgatccatcaggtcatcaatcagttcattaatgccgttatacatcgctttccaggtggtgcaggcttctggcggcggtgtgacgttattggtggtgtgtttaatcacttccagcagttcgcccgcttcatcgtgctcgctttccattacgctgattggccccattgcctggctgcccatgccttgtttgatcatcgggaagaggatctgctcttctttcatcatgtggctggaaagctcttcatgcagcatggtcaggtattttgtcagcccttttggcacgctcggtttgtcggcgtgaacgcgctcgactttagtcgcttgcagaatcagctccggcagttgctcgcggtgacgatcgtggtagcgcacgatgatatggtcgatgatttctgccagcggggcgctacgccagtctttctcaatcggttgttcagcgagctttgccagttcagcttcaatgacctcaacatccagttctttacgtgccgccgcgcgcgccagcgtctgcttaccgccacagcagtaatccatatcatatttacgaaacagagcactagcgcgaggaatagagagcgccagttcacctaaaggttggtcgcgataagccatagctgatacctcattcttaataagataagatgtattttaaatgcatctttaaggcaaaagctataacccttacgtagcagaggcttatttaactcactgccagcgtgtcaactttcactgacagattcagttaaaggtttttctggttttgctctgaccgcgatgaccacgccaatcactaacagcgcgataccgctcagcgtcattagcggcggcatttgctggcggagtaaaaaggtgtacagcaaacctgccagcgtttcgaaaacaatcagcggcccgagaatcactgtcggtaatagctggctggcgacgttccagcagagtgcgccaacccaactgcaaagcacggctatcgcaaccatcagactaataaacaccagcggacgggggccaaagggtagggagaagtccggcgtttgcgtattcagccagtaacaagcgacgagatagccgataagactaaccggcagtgtgaccagcgcctgcgctgttgcccacatcatcggatgtttgtcgggattttcccgcagccagcgggcgttgcgcagggcataccacgcccagcagaccacggaaactaacgccagcacgatgccagaggtataacgtgcccagtcaaaatcggggagtccgtggtttaactcagcaatattcacacacgccaggccgatgccaatacaaatcagtgctggggcgagttttccccacgcgagtttgccgtcgcgctggctataaagcagattggcaaagacaggaatgaccaccggcagggtgccgataatcatcgtggaaacaggcgcgccagtacgttgaatggcactggcaaggcagaagtaatagatgaggttgcccatcatagtgagcatcaaggcggtaagccagtcgcgacgcgccaactgacgcagacgcacgcgtcccagccaggcaatgggcagcgcaattaaccctaacgccagataacgccccatgctctgcaacatcgccgggtattccggcacgatcaacggcccgacaaaaataagcccccacatcaaccctgctaacagggcgtacagcacgccgctaatcattactggcatccattgatctgtcagaagaaagttcaggaagcagacatgattgctcccggcatcccgtcattatcagagaggatgcgggaggatgccactttaattaattagttattaacattaaaaagatggcttacgctttcggctaacgttgtcgttgggtggccaatcaatttgctaagtgttttgctgtcatcaaacagaccgcctttgcttgcgccaacgtcagaatccgccagcatatccgccagtccgtcgggcagtccgacgcttttcagtgccgcggcgaaatcggcttcgctcagattttgataggtaacctgtttgccgctctgtttggtcagctctgccgctaactgtgtcaacgtccaggcactatcgcccgccagttcgtaaaccttgccttcgtgaccggcttcgctaatcacgcgtgccgcagctgccgcataatctgcccgcgttgcactggcgattttgccatcgcccgccgcaccgataaatacgccgtgttccagtgctgccggggcgctggcgaggtagttttcgctgtaccagccgttgcgcagcagggtgtaaacgatgccagaatcagccagcattttctccgtctcgatgtgctcatcggcgaggccgagcggggaggtatctgcatgtagcaggctggtataagcgataaatttcacgccagccgcctttgcggcattaataacattacgatgctgcggggcacgttgacccacttcgctggaagagatcagcagtagtttttccactccctgaagtgcagatgtcagtgcggcttcatcgccgtagtcagcctgacgcacggtaatgccttgtgctgccagggcttgggcttttgccggattacgaacgatagccactatttggctggcaggaaccgttttcatcaaggattcaataacatagtgaccaagttggccagtggcaccagtaatagcgatcatgggaagtctccatcgttttgtcttgtgtttaaatacgctaacacctaaacttacttttagtaagtacgtacaaaaaggtaagtatgaaatgagtcaggttagcctgagccaacaactgaaagagggtaatctctttgcggaacagtgcccgagccgcgaggtgttgaaacacgtcaccagccgttggggggtgttgattctggtggcgctacgcgaaggtactcatcgctttagcgacctgcggcgcaaaatcggtggggtgagtgaaaagatgcttgcgcagagcttacaggcgttagaacaggatggttttcttaaccgtatcgcgtatccggtggtgccgccgcatgtggaatatagcctcacgccgctgggcgagcaggtgagcgaaaaggttgctgcactggcggactggattgagttgaatttgcccgaggtgttggcggtgcgggatgaacgtgcggcataactgccggatgcgctgagcttatctggtctacggtgcatggcttgtagggcggataagatgcgccagcatcgcatccgccaataaatgccggatgcggttgatgatttataggccgaaaaagaagtgttttacttactcaaatccacctgataaatcgcaaacccgatatcatcggtcgcgactttattcatcggatactgccctttctctttaataaacgctgcggctttatcactcggagaggtttcgaaacggatatccagtttcttatcgccagctatcggtgctaaacgccagttgttatctgccgccgggtgaatttcccccgcacgtttgctctcatcagcaatccacgctgccagcacgctgcggttctcatccggactagcaaaagcgatatggctgtcgcccgtaccggcaaatttgccgccgtaagcgcgatagttattggtggcaaccaggaacatggcgttcggatcaatcggcttgccattaaaggtcaggttcttaatcctttccgcattggcattaatcatctggcactcgccgtcataacgggcgggctgggtaacatcaatctgataattcacaccatcaataacatcaaagttataagtgcggaaaccatcccagttgatgagactctgtggtttcgtgctgttgggatcaatctggttaaactgtcccgcggagcactccagccactctttcacctctttaccgctggctttcaccacaatcagcgtattgggatagagataaagatcggcggcattacggaaggtcaactggcctttttccacctccacatagcttgccgggtcatttttgcgaccaccgactttaaacggtgcggcagcactaagcaccggcagttttgccagatccggatcgccctgaatgtaatgctcgacatacgctttttgcgcgttgttcaccacctgcacggtcggatcgtcctgcaccagcgccagatagctatacatattgtcggcagatttaccgattggcttgctgacgaactggcgtgtggcatcgtgatcggctttgagtgtttctaccagcttgctgtcttccgccgcgagggattttttattagcgatgtcgtaaatcggtcgtgcttccgctttcgcctgcgtcacctgccatttaccgctgtcattactgagttgtaagtcgaccacaccaagatgatcgccccacatgcctggcattaccgccggaacaccattcagcgtgcctttggcgatatcagccccttcgatatcagcaaaatctttacctgggaaaacggcgtgagcatggccaaacataatggcgttaacgcccggaatttcactgaggtaataaacactgttttccgccatcactttatacggatcggcagatagcccggaatgtgccagaacgacaacaacatcggcacctttctcgcgcatttcaggcacgtatttgcgcacggtttcggtaatatcattcaccgtcactttcccggataaattagctttatcccagcccatgatttgtggtggcacgacgccaatatagccaatcttcagcgtctgtttttttccgtctttatcgaccacttcggtgtctttaattaaatacggtgtaaacattggctgtttggttctggcgtcaatgacgttggcatttacataagggaatttcgctcctgccagcgcatttttcaggtaatccagaccgtagttaaactcgtggttgccaagcgttccgacggtatagtccagcgtatttaatgccttatagaccgggtgaatatcacctgcttttaatcctttcgcgctcatgtaatcggccagcggactcccctgaatcaaatcgccgttatcaaccagtacgctgtttttcacttcattgcgggcatcgttaatcaggcttgccgtacgtaccagtccgaatttttccgtggcggtgtctttgtaataatcgaaatccatcatgttgctatgcagatcagtggtttccatgatacgcagatcgaccgtcgctgcattcacactggcggcaatcagcgtggccaggagcgttgcgctaaacttaatcatcagggacatccttttatcatcgggaatacgaaagaaaagggagaataaacgtcttacttatagaacagtgaagaatgccacaattttacgctttgaaaatgatgacactatcacagttggcgcattcattaacgatagggtataagtaaaacaataagttaacaccgctcacagagacgaggtggagaaatgttagatcaagtatgccagcttgcacggaatgcaggcgatgccattatgcaggtctacgacgggacgaaaccgatggacgtcgtcagcaaagcggacaattctccggtaacggcagcggatattgccgctcacaccgttatcatggacggtttacgtacgctgacaccggatgttccggtcctttctgaagaagatcctcccggttgggaagtccgtcagcactggcagcgttactggctggtagactcgctggatggtactaaagagtttattaaacgtaatggcgaattcaccgttaacattgcgctcattgaccatggcaaaccgattttaggcgtggtgtatgcgccggtaatgaacgtaatgtacagcgcggcagaaggcaaagcgtggaaagaagagtgcggtgtgcgcaagcagattcaggtccgcgatgcgcgcccgccgctggtggtgatcagccgttcccatgcggatgcggagctgaaagagtatctgcaacagcttggcgaacatcagaccacgtccatcggctctagcctgaaattctgcctggtggcggaaggacaggcgcagctgtacccgcgcttcggaccaacgaatatttgggacaccgccgctggacatgctgtagctgcagctgccggagcgcacgttcacgactggcagggtaaaccgctggattacactccgcgtgagagcttcctgaatccggggttcagagtgtctatttactaaattcagatggcagaaacagtgtatttcctgattctgccatcctgatttctcccaacctaaaaagttataaataaaaagagattgtatttaaagtgcaaaaattcaattgctaataagttacattttaataatgagcgttttttgatagtttacttctatagtgagatatttaatggcgacataaagtaaccaaataaaataaggttgtcatatgttacccaggatcagacacaataattttattggtgcggtggagttatttgtaaagtctagctatacaaaaacacatagtaacaatttttttaacaacatccatcatgcatttaagaaaaaagattggattagcaattatgatagcctgttaactttgagggagttctttcgttgcgcaactcagattgataaaagtggttatcaggtgcttagtagtaaaaatgaaactgttcacgccatggataagtttcttatcagtttcagccttaaagataacggtgccgaatatacaatgacattgcgaggtagtggatttgaatacgaagaaatacccataacaataaatgaatataacagtttcatggatttcaaaaaccgtgaatttccgttagaacaaaacagacgattgtatgcccgggatattctacagaaaaaacagtctgacataccgaaaaggattaaaggttatattcaccaggcgattggtgacgtgtctttaggttatgccttattggaggatatagtaagcaaattaaaacggggtaaatttgaactccaaataccaggaggtggaattaaagaatgcgatggatggtatatttacgaaaaaataattgatgataattttgccatagtcatagaatctttgggctttgcgcttaaaatctatggaggggatgaacgttttcgtaatggttcctctgttgttttggaggatgaagattactctcttatttataattttctggttaatgcaggttgccaacaagtcgaattagccgaacaagtggatgcgatagtaagtgcgaatctggccgcagatagcgatattaccaaagaaaagatttgcgagaaatataaaagcaccattgaggcgtttaaaaaagagcaactagcgttaccagtattagttcggcgtaagaacagtgagacttaattcccctatcccatagataacgataggggaaaattatttttgcagaatttatgttattgccattatttgagcaacttttgcagcaggtccatcacttgctgcacctcttccggtgtgagcgccccgtctttggcccattgcacgcgaccatccttatccagcaccactacagcggaactttcttcatccagctgccaggcaccgagcgcgacgccattgctatcgacaataaactggctccagggataaagctttttattactctccagactgctgcgcacaaacatcccactacccggaatcgcgtcgtcggtgttaacaatggtggtggtctggtaacgatcgtgcggtaacttcgcacttttaatcgcttcaatcagcgtcgcgtttttctcttttgcagaggtgcgaccagcaatatgttgcagtactcgcacttttcccactaactgcgcgctgttccaggttttgtagctaaactgatctttatcaagcaccaactcgccccgatcggtaatgccaatcggcggcactcgctgaccggtttcgaactgatgtgcggaagccatcatcggcaacagcaggcaggtgagtgccagaatcttgcgtagggtcatggtgtttccttcttatgatatgcaggtgatccgaccacttgggtctgagttttaatcatatgtgctatttatcgaatttcccgcaagtgtgatgccagtttgcggtcaagcgcacaaatcatatgaaaaatgaatgcttatactgaagaccgcgcttcggtaaaaagataattctgaataattgtaacctttaggtaaaaaaagttatacgcggtggaaacattgcccggatagtctatagtcactaagcattaaaatttgcgcctcataatagttgggccgattgtggcaccgcacaggcgtaatactcagcaggagataacaatgaaaattttccaacggtacaacccacttcaggtggcgaagtacgtaaagatcctgttccgtggacggttatacatcaaggacgttggcgcttttgaattcgataagggtaagattcttatcccaaaagtgaaggataagctgcatttgagtgtgatgtccgaagttaaccgtcaggttatgcgtctgcaaacagagatggcttaaccaaagtgctatgcagtaaaaagtgctatgcagtaataagacggctcctgattcaggagccgttgatgtttctgggggttacgcgacgctttcttctttatctttagcgtcaggcagttttgggctaagggcggtggccttgctgtcgatccgggtcaccagcagctggtcgatgcggtagttatcgatatccaccacttcaaatttgtagccggcgaatttcacgctatcggtgcgtttcgggatcttacgcagcataaacatcataaagccgccgatggtttcgtagttgccgctctgcgggaactcgtcaatatccagcacgcgcatgacgtcgtcaattggggtgccgccgtcaatcagccaactgttctcatcacgggcgacaatctgctcttccagcccctgaccgaccagatcgcccatcagcgtggtcatcacgtcattgagggtgatgatccccaccaccagcgcgtactcgttcatgatcaccgcgaagtcttcacctgcggttttaaaactttccaacgcctcactaagggttaacgtatccggcacaatcagcgtgttgcgaatttgtacgccgctgttcagtgccaggctttggttagccagcacgcggttcagcaggtctttagaatcgacataaccgatgatgtggtcaatatcttcattacagacgaggaacttagagtgcggatgttccgccaccttattcttcaggctttgctcatcttcgtggagatcaaaccaaatcacgttttcacgcggtgtcatactagacggaacggtacgggattccagctcaaagacgttttcaatcagctcgtgttcctgtttacgtaacacgcccgccagcgcaccggcttccactaccgcgtagatgtcatcagaagtgatgtcatctttacgtaccattggcagtttgaaaatacggaagattatgttcgccaggccgttgaagaaccacaccagcggggtgcaaacgtacaggcagaagcgcatcgggttgatgatacgcaaagccacagcttctggcgcaatcataccgatgcgtttcggggttaaatccgcaaacaggataaacatgccagtcactaagctgaaagagagaataaagctcagttgctcagagagctctgcgctcatatagcgggagaacaggctgtgaaaagctggagaaaatgccgcatcaccgacgataccgccgagaatcgccactgcgttcagaccgatttggaccacggtaaagaacatgccgggattttcctgcatattcagaacgcgttgggcatttatattgccttcatcagccagcagtttaagtttgattttgcgactggcggcaaggctgatctcggacatgctgaagaacgcacttacagcgatcaagcagagtatgactaaaatactgtttaacatatcttatccgacctttcaggccagatcctcggaaggggaagttgattaatttgtgtgaaatacacattgaaagccgattcgaagaaagtgaaccggcattttcagtggctagtatagcgtaaggtactgtaaagccgccagagggttaaaattcagacagctgaaaaatgcaaaactgcctgatacgctatgccgatcaggcctacgcagtccttgcaatatattgaatttggacgattttgtaggcctggtaagtcgtttacgccgcatcaggcatagacaaagagcactttatcaacaaactacatttgtacccgtaacgttatgcttccggcggcagacagacgccaattccgccaattccacagtaaccatacgggtttttatgcagatattgctggtggtcatcttcggcataataaaacggtgtggcgttagcgatttccgtggtgatgtgacgatcgtcatcggcggcaagcatcgccgcctgaaaacgttccagactggcgcgagctgcggcatcctgttctggggtcagcggataaatcgcactacgatactgcgtgccgtggtcattgccctgacgcattccctgggcgggatcgtgattctcccaaaatacctgtagcaactgctcatagctgatgacggaaggatcgtaaacaatgcgtaccgcttcggcatgacccgtatcaccggagcacacttcccgataagtcggatttggcgtatagccgccggtatagcctgcggcggtgctgtaaacgccgggtaactgccagaacagacgctccacaccccagaaacaacccatcgcaaaaatggcaatctccattccgtcaggtacattggtcatactgtgaccgttgaccgcatgcagcgtggctacgggcatcggggtgttacgtccaggcagggcatcggcgggggaaaccagatgctttttatcaaataaactcatggtgtcgctctcccgaaaatcggtcattggggttaaggttgtaacaagaggcgtatttgcacacaataaccaccgtgaataggtctaaagtaaaacataagaaatatttggggtttagtctgctttttaatccatattactggatttttgttaagccgtttaacggcgttccaggggcaggaaaaaaggatattcaggagaaaatgtgcgctatatccgacagttatgctgtgtaagcttactctgcttaagcggatctgccgtcgccgcgaacgtccgtctacaggtcgaggggttaagcggacagctggaaaagaacgttcgtgcgcagctttctacgattgaaagtgatgaagtgacgccagaccgtcgctttcgcgcacgcgtcgatgatgccatccgcgaaggtctgaaagcgctgggttattaccagccgaccattgaatttgatctccgtccaccgccaaagaaagggcggcaggtattgatcgccaaagtcacgccaggcgtgccggtgttaattggcggcaccgatgtggtattgcgcggcggcgcgcggaccgataaagactatttgaaattgctcgatactcgcccggctattggcacggtactgaaccagggcgattatgaaaatttcaaaaagtccttaaccagcattgcgttgcgtaaaggttatttcgatagcgaatttaccaaagcgcagctgggcattgcgctcggcctgcataaagccttctgggatattgattataacagtggcgaacgttaccgctttgggcatgtgacctttgaaggaagtcaaatccgcgatgaatacctgcaaaatctggtgccgtttaaagagggcgatgagtacgaaagcaaagatctggcagaactgaaccgccgactttctgctaccggctggtttaacagcgtggtggtggctccacaatttgataaagcgcgcgaaacgaaagtattaccattgacgggcgtggttagcccgcgaacagaaaacaccatcgaaaccggggtcggttactctacggacgtgggaccgcgcgtgaaagcgacgtggaaaaagccgtggatgaactcttatggtcacagtctgaccaccagtactagtatttccgcgccggaacagaccctcgacttcagctataaaatgccgctgctgaagaatccactggaacaatattatttggtgcagggcggttttaagcgcactgacctgaacgataccgaatctgactccactacgctggtggcttctcgctactgggatctctccagcggctggcagcgtgccattaacctgcgctggagtctcgaccactttactcagggtgaaattaccaataccacgatgctgttttatcctggggtgatgattagccgcacgcgttctcgtggtggcctgatgccaacctggggcgacagccaacgctactctatcgactactccaacacggcctggggtagtgatgtcgatttctccgttttccaggcgcagaacgtctggatccgcacactgtacgatcgccatcgttttgttacacgcggcacgctgggctggattgaaaccggtgatttcgacaaagtaccgccggatctgcgtttcttcgccgggggcgaccgcagtattcgtggctacaaatacaaatctatcgctccgaaatacgccaacggtgacctgaaaggggccagcaagttgataaccggaagcctggaataccagtacaacgtgaccggaaaatggtggggcgcggtgtttgtcgatagtggcgaagcggtaagcgatattcgccgcagcgactttaaaaccggtaccggggtcggcgtgcgctgggaaagcccggtcgggccaatcaaactcgattttgccgtaccggtcgcggataaagacgaacacgggttacagttttacatcggtctggggccagaattatgagtttatggaaaaaaatcagcctcggcgtggttatcgttatcttactgttgctgggaagcgtggcgtttctggtgggcaccaccagcggcctgcatctggtatttaaagcggcggatcgctgggtgccaggactggatattggcaaggtcaccggcggctggcgcgatctcaccttgtctgacgttcgttatgagcagccaggcgtggcggtaaaagcgggcaatctgcatctggctgtcgggcttgagtgcctgtggaacagcagtgtttgtattaatgatctggcgctgaaagacattcaggtcaacatcgacagtaaaaaaatgcctccttctgaacaggttgaagaagaggaagatagcggtccgctggatctctccacgccgtatcccatcaccctgacacgggtggcactggacaacgtcaacattaagattgatgacaccacggtaagcgtgatggacttcacctccggcctgaactggcaggagaaaaccctgaccctgaaaccgacgagcctgaaaggcctgctgattgctctgccgaaagtggcggaagtggcgcaggaagaagtggtcgaaccgaaaattgaaaatccgcagccggatgaaaagccgctcggcgaaacgctgaaagatctcttttctcgcccggtattgccggaaatgaccgacgtgcatttgccgcttaacctgaacattgaagagtttaagggcgagcagctgcgcgtgacgggcgacacggacatcaccgtgagcaccatgctgctgaaagtgagcagcattgacggcaatactaaactggacgccctggatatcgattccagtcaagggatcgtcaacgccagcggcacggcgcagctgagtgacaactggccggtggacatcactctcaacagtacactgaacgtggagccgttgaaaggtgaaaaagtgaagctgaaaatgggcggcgcgctgcgcgaacagctggagattggcgttaatctttccggtccggtggatatggatttacgcgcccagacgcgactggcggaagccggattgccgctcaacgtggaagtgaacagcaaacagctttactggccgttcactggtgagaagcagtatcaggcggatgatctgaaactgaaacttaccggcaaaatgaccgattacacgctctctatgcgtacggcagtgaagggacaggagatcccgcccgcgactattaccctcgacgccaaaggtaatgaacagcaggtcaatctcgacaaactcaccgtcgcggcgctggaagggaaaactgaactcaaggcgttgctcgactggcaacaggccattagttggcgcggtgagctaacgcttaacggcattaacaccgccaaagagttcccggactggccgagcaaactcaatggcttgattaaaacccgcggtagcctgtacggcggcacctggcagatggacgtgccggagttgaagctgaccggtaacgttaaacagaacaaagtgaacgttgacggcacgctgaaaggcaacagttatatgcagtggatgatcccagggcttcatctggaactcgggccaaacagtgccgaagtgaaaggcgagctgggggtaaaagatctcaatcttgatgccaccatcaacgcgccggggctggataacgcgctgccggggcttggcggtacagcgaaagggctggtgaaagtacgcggcacggtggaagcgccacaactactggcagatatcaccgcgcgcggcctgcgctggcaggaactttccgtggcgcaggttcgcgtggaaggcgatatcaaatccaccgatcagatcgccgggaaactcgacgtacgcgttgagcaaattagccagccggatgtaaatatcaacctcgtcaccctgaatgccaaaggcagcgaaaagcagcacgagctacagttgcggattcagggggagcctgtctccgggcagcttaatctggcaggaagttttgatcgcaaagaagaacgctggaagggaactcttagcaatacccgcttccagacgccggttggcccgtggagcctgacccgcgatattgcgctggattaccgcaataaggagcaaaaaatcagcatcgggccacactgctggcttaacccgaatgcggaactgtgcgtgccgcaaactatcgatgcgggggccgaagggcgtgcggtggtgaatctcaaccgcttcgacctcgccatgctgaaaccgtttatgccagaaaccactcaggccagcggtatcttcacgggtaaagcggacgttgcctgggacaccacgaaagaggggctgccgcagggcagtatcacccttagcgggcgtaacgtgcaggtaacgcaaaccgtcaacgatgcggcgctgcccgtggcgtttcagacactgaatctgacggcggaattgcgtaacaaccgtgccgaattgggctggaccatccgcctgaccaataacggccagtttgatggacaggtgcaggtgaccgatccgcaaggccgccgtaatcttggtggcaacgtcaatatccgtaacttcaaccttgcgatgataaaccccatctttacccgtggggaaaaagcagcggggatggtgagtgccaacttgcgtctgggtggtgatgtgcaaagcccgcagttgtttggtcagcttcaggttacgggtgtggatatcgatggcaactttatgccgtttgatatgcaaccgagccagcttgcggtcaactttaacggtatgcgcagcacgcttgccggtacagtacggacccagcagggtgaaatctacctgaacggtgatgccgactggagccaaattgaaaactggcgggcgcgggtaacggcgaaaggcagtaaagtgcggatcaccgtgccgccgatggtacgaatggatgtaagcccagatgttgtattcgaggctacaccaaacctgtttaccctcgatggtcgcgtggatgtcccttgggcgcgcatcgtggtgcacgatctgccggaaagcgcagtaggcgtctccagcgatgtggtgatgcttaacgataacctgcaaccggaagagccgaaaacggcgagcattccgattaacagtaacctgattgtccacgttggcaacaatgtgcgcattgacgcctttggcctgaaagcgcggctgacgggcgatctcaatgtcgttcaggacaaacaagggctgggtctgaacgggcagatcaacatccctgaagggcgcttccatgcctatggtcaggatctgattgtgcgtaaaggtgagttactgttctctggtccgccagatcaaccgtatcttaatattgaagctattcgtaacccggatgctacagaagacgacgtaatcgccggagttcgcgtcactggtctggcggacgaaccgaaagcggagatcttctctgacccggcgatgagccaacaagctgccttgtcttatttgctacgtggacaagggctggagagcgatcagagcgacagtgcggcaatgaccagcatgctgattggtttgggggttgcgcaaagtggccagattgtgggtaaaatcggcgagacgtttggcgtaagcaatttagcgctcgacacccagggagtaggcgactcctcccaggtagtggtcagcggctatgtattgccaggtctgcaagtgaaatacggcgtgggtatatttgactctatagcaacactcacgttacgttatcgcctgatgcctaagctatatctggaagccgtgtctggtgtagaccaggcactggatttgctctatcagttcgagttttaacaatgcgaatatttgtctacggcagtttacgccacaaacaaggcaacagtcactggatgaccaatgcccagttactgggcgatttcagtatcgataactaccagttgtatagcctgggccactatccaggcgcagttccggggaacggaacggtacacggtgaagtttatcgtattgacaacgccacgctggccgaacttgatgccttgcgcaccaggggcggtgaatacgcgcgccagttgattcagacgccgtacgggagtgcatggatgtacgtttatcaacgacccgtcgatggattaaagctaattgaaagcggcgactggttagacagggataagtaaccatatgcatacgccaccttcgggtggcgttgttttttgcgagacgactcgcattctgttttgtaattccctcaccttttgcttttctctccgagccgctttccatatctattaacgcataaaaaactctgctggcattcacaaatgcgcaggggtaaaacgtttcctgtagcaccgtgagttatactttgtataacttaaggaggtgcagatgcgtattaccataaaaagatgggggaacagtgcaggtatggtcattcccaatatcgtaatgaaagaacttaacttacagccggggcagagcgtggaggcgcaagtgagcaacaatcaactgattctgacacccatctccaggcgctacagccttgatgaactgctggcacagtgtgacatgaacgccgcggaacttagcgagcaggatgtctggggtaaatccacccctgcgggtgacgaaatatggtaaagaaaagtgaatttgaacggggagacattgtgctggttggctttgatccagcaagcggccatgaacagcaaggtgctggtcgacctgcgcttgtgctctccgttcaagcctttaatcaactgggaatgacgctggtggcccccattacgcagggcggaaattttgcccgttatgccggatttagcgttcctttacattgcgaagaaggcgatgtgcacggcgtggtgctggtgaatcaggtgcggatgatggatctacacgcccggctggcaaagcgtattggtctggctgcggatgaggtggtggaagaggcgttattacgcttgcaggcggtggtggaataaggtgtgtttatttatcgcgggcataaaaaaacccttactaaccgaagcccggcgttcagggttattacgccagaagaacttatttattctttgcgcgctcgaaggaggcaacgatttcagctttagcggcttctgcgttttcccaaccttcaactttcacccacttgcctttttcgaggtctttgtagtgctcgaagaagtgagcgatttgcgctttcagcagttcaggcagatcgttaacgtctttaatgtgatcgtattctttgctcagcttgctgtgcggaaccgcaaccagtttcgcatcttcaccggcttcgtcggtcattttcagaacgccaaccggacggcaacggatcacagaacccggctgcagcgggtacggagttgggaccagtacgtcaaccgggtcaccgtccagagacagggtgtggttgatgtaaccgtagttgcatggatagaacatcgcggtggacatgaagcggtcaacgaacagtgcgccgctctctttgtcgatttcgtatttgatcggatctgcgttagccgggatctcaataacaacgtagatgtcttccggcagatctttacccgcagggacgttgagtaagctcatgtctgtttcctttaaaaatatgtggcaaacaagtgccgagtattatagccaactcgcgccgaatgtcttcgcttgttttcgtcttcattttcctttttcaccagttttaagacggtatacagagcaggaaaatccataaccgtagccgcatttttcatagtgagatgaaagcgattacaaacttgtgattaacgttttatttacttttttgaagtgtgatgtaacgcaatctgttacataacgaattgtctatagttttttcgcgaacatcttttaaccaataataactaccccgacgaggacaaccctatgtggaaacgcttacttatagtctctgcagtcagcgcagccatgagctctatggcgttggccgctccattaaccgttggatttagccaggtcggaagcgaaagtggctggcgtgccgcagaaaccaatgtggcgaaaagtgaagccgaaaagcgcggaatcacgttgaaaattgccgatggtcagcaaaagcaggaaaaccagattaaagcggtacgttccttcgttgcacaaggggtggatgcgatctttatcgctccggtggtcgcgacaggttgggaaccggtattaaaagaggcgaaagatgccgaaatcccggtattcttgctcgatcgttccattgatgtgaaagacaaatctctctatatgaccaccgtcactgccgacaacatcctcgaaggcaagttgattggtgactggctggtaaaagaagtgaatggcaaaccatgcaacgtggtggagctgcagggcaccgttggggccagcgtcgccattgaccgtaagaaaggctttgccgaagccattaagaatgcgccaaatatcaaaatcatccgcagccagagtggtgacttcacccgcagtaaaggcaaagaagtcatggagagctttatcaaagcggaaaacaacggcaaaaacatctgcatggtttacgcccataacgacgacatggtgattggtgcaattcaggcaattaaagaagcgggcctgaaaccgggcaaagatatcctcacgggttccattgacggtgtaccggacatctacaaagcgatgatggatggcgaagcgaacgccagtgttgaactgacgccgaatatggcaggtcccgccttcgacgcgctggagaaatacaaaaaagacggcaccatgcctgaaaagctgacgttaaccaaatccaccctttacctgcctgataccgcaaaagaagaattagagaagaagaaaaatatggggtattgagggttgctatgcctgatgccgattcgtaggccggataaggcgctcgcgccgcatccggcgatggtgcactgaagcctgatgcgacgcttaccgcgtcttatcatgcctactgggagcacgctttacaccgggggaaaccatgacgaccgaccaacaccaggagatcctccgcaccgaaggattaagtaaatttttccccggcgtcaaagcgttagacaacgttgatttcagcctgcgccgtggcgaaatcatggcgctgctcggtgaaaacggggcgggaaaaagtacgctaatcaaagcattaactggtgtataccacgccgatcgcggcaccatctggctggaaggccaggctatcagtccgaaaaataccgcccacgcgcaacaactcggcattggcaccgtctatcaggaagtcaacctgctacccaatatgagcgtcgctgataatctatttataggccgcgaacccaaacgcttcggccttctacgccgcaaagagatggaaaagcgcgccaccgaactgatggcatcttacggtttctccctcgacgtgcgcgaaccgctcaaccgctttagtgtcgcgatgcagcaaatcgtcgctatttgtcgggctatcgatctctctgccaaagtgctgatcctcgatgaacccaccgccagtctcgacacccaggaagtggagttactgtttgacctgatgcgtcagttgcgcgatcgcggcgtcagcctgatttttgtcactcactttctcgatcaggtctatcaggtcagcgatcggatcaccgtcttacgcaacggcagtttcgtaggctgtcgggaaacgtgcgagctaccgcagatcgaactggtaaaaatgatgctggggcgcgagctggatacccacgcgctacagcgtgccgggcgaacattgttgagcgacaaacccgttgccgcgttcaaaaattacggcaaaaaaggaacgatcgcaccgtttgatctcgaagtacgccccggcgagatcgtcggtctggctggattgctgggaagtggacgtaccgaaaccgccgaagtgatcttcggtatcaaacctgctgacagcggcacggcgttgatcaaaggcaaaccgcaaaacctgcgaagcccacatcaggctagcgtactgggcattggcttctgcccggaagacaggaaaaccgatggcatcatcgctgccgccagcgtgcgggaaaatatcatcctcgctctccaggcccagcgcggctggctacgtcccatttcccgcaaagaacagcaagagattgccgaacgctttatccgccagcttggcattcgcacacctagtactgaacaaccgattgaatttctctccggcggcaatcagcaaaaagtgttgcttagtcgttggctactgacccgaccgcaatttctgatcctcgatgagccaacccgcggcattgatgttggtgcccacgccgagatcatccgcctgattgaaacgctatgcgccgatggtctggcgctgctggtgatctcctccgaactggaagagctggtgggctatgccgatcgggtgattatcatgcgcgatcgcaaacaggtggcggagatcccgctggcagagctttccgttccggcgatcatgaacgccattgcggcgtaaggagaacagtgtgatgcctcaatctcttccggacaccactacgccaaaaaggcgctttcgctggccgacggggatgccgcagctggtagcactgttgctggtgctgctggtcgatagcctggtagccccgcatttctggcaggtggtgcttcaggatgggcgtttgttcggtagccccatagacattcttaaccgtgcagctcccgttgcgttactggcgattggcatgacgctggtgatcgccaccggtgggattgatctctccgtaggggcggtgatggctatcgccggagccacaacggctgcgatgacggtcgcgggattcagcctgccgattgttttgttaagcgccctgggcaccggcatcctggcgggattgtggaacggcatactggtagcgatcctcaaaattcagccgtttgtcgccactctgatcctgatggtcgccgggcgcggcgtggcgcaactgatcaccgccgggcagatcgtcacgtttaacagcccggatctcagttggttcggcagtggaagcctgttgttcctgccaacgccggtcattatcgcggtgctgacgcttatcctgttctggctgttgacccgcaaaacggcgctggggatgtttatcgaagccgttggtatcaacattcgggcggcaaaaaatgccggggtaaacacgcgaatcatcgtcatgctcacttatgtgttgagcgggctgtgtgcggcgattgcgggcattatcgtggcggcggatattcgcggtgccgatgccaacaacgctgggttatggctggagctggacgccattctcgcggtggtgattggcggcggaagcctgatgggcgggcgctttaacctgctacttagcgtggtgggggcgctgattattcaggggatgaacaccggaattttgcttagcggctttccgccagagatgaaccaggtggtgaaagcggtggtggtgctttgcgtgctgattgttcagagccaacgctttatcagtctgattaaaggagtacgtagccgtgataaaacgtaatttgccactgatgatcaccatcggcgtctttgtgttgggttatctttactgcctgacccagtttcccggttttgcttccacaagagtgatctgcaatatcctgaccgataatgcctttcttgggatcattgccgttggcatgacctttgtgatcctcagtggtgggatcgatctctccgtcggtagcgtgatcgcctttactggcgtgtttctggcaaaagtgattggcgatttcggcctcagcccgctgctggcgtttccgctagtgctggtgatgggctgtgccttcggcgcatttatggggcttctgatcgacgccctgaagatcccggcatttatcattacgcttgcggggatgttctttttgcgcggcgtcagctatctcgttagcgaagagagcattccgataaaccatcccatttatgacacgctcagtagccttgcgtggaaaatccctggcggcggtcgcttaagtgcgatgggactgctgatgttggcggtggtggttatcggcatattcctcgcgcatcgtacccgttttggtaatcaggtatacgccattggcggcaacgcaacgagcgcgaatctgatggggatttccactcgcagcaccactattcgcatttatatgctctccaccggactggcaacgctggcggggattgtcttcagcatttatacccaggccggatatgcgctggcgggcgtaggtgtggaactggatgctatcgccagtgtggtaattggcggtacgcttttgagcggtggcgttggaacggtattagggacgctttttggcgtggcgattcagggactgattcagacttacataaactttgatggcacgctgagttcctggtggacgaaaatcgccatcggtattttgttgtttatttttatagcattacagcgtggattaacggtgctgtgggagaatcgtcagagtagcccagtgacaagagtcaacattgcgcagcaataaaaacgcctctccgtgtggagaggcgcaggagattacgcgtccgggaactcacggataaagcgttcgacatcttcaaccatatggtcgttgccgacaaagaaactacggcgctggtgcagggtttccgggatgatatccagaatacgctctttgccatcgctcgctttaccgcccgcttgttccgccaggaatgccatcgggttgcactcatacagcaaacgcagtttgccgtccgggtggctggcggtgcttgggtagagataaataccgcctttcagcaggttacggtggaaatccgcgaccagactaccgatataacgactggtataagggcggttggtggatttatcttcttcctggcagaatttaatgtacttcttcaccccgttcggaaacttaatgtagtttccttcgttgatggagtaggttttgcctttctccgggaagcgcatccgttcctggcacaggcagaaaacgccgaggctaggatcgtaagtaaaggcgtgaacaccgcatccggtggtgtaaaccagcatggtagaggagccgtataccacgtaacctgccgcaacctgtttgttaccaggctggaggaaatcttcttccgttaccggcgtgccaacaggcgtaacgcggcggtagatggagaaaatggtaccgacagagacgttaacatcgatgttggagctgccatccagggggtccatcagcaccacgtattttgcgtgttcacagccttcaaagacgacaatctcatcttcttcttcagaggcaatgcccgcaacgatatcgcgtgctttcagtgcggctttcagtttttcattagcgaacaagtcgagtttctgctgaacctcgccctgcacgttctcagcaccgctggcacccaggatatcaaccagtcctgctttgttgatatcgcgatggataatcttggcgcccagttttattgcgctcagcaaagcagtgagctcaccggtagcatgagaaaactcgtgctgcttttcgacaataaattcacctaacgttttcataaaactttccctgcaatgtttatggagtaaagcgaccgcaacaatcttaacaaataatctcaatgttgcgctcaggtgaatcgcgccagcaaattacggattatcctgaaatgcgtttctcacttgcccgacatatgcgtaaaatgagcggcagattaaaaaaggatagtgacgtatgcgcattcatattttaggaatttgtggcacatttatgggcggtctggcgatgctggcgcgccagttaggccatgaagtaacgggtagcgacgccaatgtgtatccgccgatgagcaccttacttgagaagcaaggcattgagctgattcaggggtacgatgccagccagctcgagccgcagccggatctggtgattattggcaacgccatgacccgtggaaatccgtgtgtggaagcggtactggaaaaaaatatcccttatatgagtggtccacagtggctgcacgattttgtgctgcgcgaccgctgggtgctggccgttgccggtacacacggcaaaaccaccaccgcgggaatggcgacctggattctggaacagtgtggttacaaaccgggctttgtaatcggcggtgtgccggggaactttgaggttagcgctcatctgggcgaaagcgacttctttgttatcgaagcggatgagtatgactgcgccttcttcgacaaacgctctaaatttgttcattactgcccgcgtacgctgatcctcaacaaccttgagttcgatcacgccgatatctttgacgacctgaaagcgatccagaaacagttccaccatctggtgcgtatcgttccggggcagggccgtattatctggccggaaaatgacatcaacctgaaacagaccatggcgatgggctgctggagcgagcaggagctggtgggtgagcagggtcactggcaggcgaaaaagctgaccaccgatgcttccgaatgggaagttttgctggatggcgaaaaagtgggcgaagtgaaatggagcctggtaggcgaacataatatgcacaatggcctgatggcgattgcagcggctcgccatgttggtgtagcgccggcagatgccgctaacgcgctgggtagctttattaatgctcgtcgccgtctggagttgcgtggtgaagcgaatggcgtcacggtatatgacgattttgcccatcacccgacggcgattctggcaacgctggcggcgctgcgtggcaaagttggtggtacggcgcgcattattgctgtgctggagccgcgcagcaataccatgaaaatggggatctgcaaagacgatctggcacctagtttaggtcgtgccgatgaagtcttcctgctgcaaccggcgcatattccgtggcaggtggcagaagtggcagaagcctgcgttcagcctgcacactggagtggcgatgtggatacgctggcagatatggtggtgaaaaccgctcagcctggcgaccatattctggtgatgagcaacggcggttttggtgggatccatcagaaactgctggatgggctggcgaagaaggcggaagccgcgcagtaattcggccttagccagatatagtatgcgtaggccggataaggcgttcacgccgcatccggcatttgagcatagtgcctgatgcgacgcttgatgcgtcttatcaggcctacaggtgcaccgtatccggcaaaccatactcacatcaacaacgaaaattacccttcgttctccgctaactcgcgcagatactggaaaatctggcgtgcggatttcggcggcttattcccttctttctctttcttcgcgttgcggatcagagtacgcagttgctgacgatcggcatcgggccacagatttaatacctcagcgatggcgtcatcaccttgatcgatcagacgatcgcgcaggttttccagtttatggaacagcaccacctgctggttgtgacggtttttcagcttatccagcgcctgacgaataggctctacgtcgcgctggcgcagcatcttaccgatgagctgcaactggcggcggcgaccttccatcttaatacgctgggcgagctcaatagccgcgcgcagatccgcatctaacgggatcttatccagcgcgtttttccccagatcaacaatttccgcgccaaggcgttttagctcctcggcatcacgtttaatttcacttttactgacccagataatttcatcgtcttcgtcttcgatgtcatcaccgggaacgtcgtcgagccagtcttcgggctgcttagtcatctcaggctccttaaaaaaagaggctaatgttaccagttaagatgcgcactgaaaaacggttctctgttagacttcagagaaactctctacattatggcacttgcaatgaaagtaatctctcaagttgaagcgcagcgcaagattctggaagaagcagtttccactgcgctggagttggccagtggcaaaagcgacggtgcggaagttgccgtcagcaagaccaccggcattagcgtaagcacgcgttatggtgaagtggagaatgttgaattcaatagcgatggcgcgctggggatcactgtttatcaccagaaccgcaaaggtagcgcaagttccaccgatttaagcccgcaggccattgcccgtactgtacaggcggcgctggatattgcccgttataccagcccagatccctgtgccggcgtggcagacaaagagctgctggcctttgacgcaccagatctcgacttgttccaccctgcggaagtttccccggatgaagccattgaactggcggcccgcgcagaacaggcggcattgcaggcggacaaacgcatcaccaataccgaaggtggcagctttaacagccactacggtgtcaaagtttttggcaacagccacggcatgttgcagggttactgcagtacgcgtcatagcctctccagctgtgtaattgccgaagaaaatggcgatatggagcgtgattacgcctacaccattggtcgtgcgatgagcgatctgcaaacgccagagtgggttggggccgactgtgctcgccgtactttaagccgtctgagtccgcgtaaactctccaccatgaaagcgccagtcatttttgccaatgaagtggcaaccgggctttttgggcatctggtgggggcgatagcgggtggaagcgtttatcgtaaatctaccttcctgctggatagcctgggtaaacaaattctgccggactggctgaccattgaagagcatccgcatctgctgaaagggctggcgagcacgccattcgacagcgaaggtgtgcgcaccgagcgtcgcgatattattaaagatggcatcctgactcagtggctgctgaccagctacagcgcgcggaaactggggctgaaaagcaccggacatgcgggcggtattcacaactggcggattgccggacaaggtctaagcttcgagcagatgctcaaagagatgggcaccgggctggtggtgacggaattgatgggccagggcgtgagtgccattaccggtgattattcccgtggtgcagcgggcttctgggtagagaatggcgaaattcagtatccggtgagcgaaatcaccatcgcaggtaatttaaaagatatgtggcgcaatattgtcaccgtcggtaacgatattgaaacacgcagtaatatacagtgtggttctgtgctgttgccggagatgaaaatcgccggacagtaaaaaaactggcgcgacctgccgcgctataaactaaaaaattacacaaaatcattcgcactgcatcgagacggaaagtgaatgagggccggggagcgtactcgcagtacgtgacccggtcgaatgagcgtagtcgtcgatgaggcagtgtgaaggatgaagtgtaaataaaaaaggaactattcttgcagtctcctcgttggtattcagttcggcgtcatttgctgctgatctcgaagacaatatggaaaccctcaacgacaatttaaaagtggtcgaaaaagccgataacgcggcgcaagtcaaagacgcgttaacgaagatgcgcgccgcagcgctggatgcgcaaaaagcaacgccgccgaagctcgaagataaaagtccggacagcccggaaatgaaagatttccgccacggtttcgacattctggtcggtcagattgacgacgcgctgaagctggcaaatgaaggtaaagtaaaagaagcgcaggctgctgcagagcaactgaaaacgacccgcaatagttatcacaagaagtatcgttaattcctcatttccctgttgcctgcactcaggtaacagggaacttatcatcgcaaatgatgcaccacctgattgctgctgccgcgccagatcagggaagggtcttttaaatcctgcacaaatttgccgtcgaccagcacgttaatcaaatcaacaacctgcatttgcgcagcgttgagttcgtcgagtttatagcctgtccacacccagatgtctttacccggacactcggcgcggatgcgttgtaccagtttcagaatatccggcacgttttgcggatgcagcggatcgccgccggagagggaaataccctggcgtttgatacgagtgtcattcagatcgttaatgatctggtcttccattgctttggtaaatggctgaccggaatttacccgccatgtgcttttgttatagcaaccggggcattcatgaacacacccggagacaaacagggtgcaacgagtgccggggccgttgacgatgtcgacaggatagtactgatgataattcattatttcgcctggcttatcagtccgcgtgtaggctgcatccggtaatcaatgcctgatgcgacgctgtcgcgtcttatcagacctggagcaattgccaaatgtaggccggataaggcgtttacgccgcatccggcatttgcttagctcagagtgaagattaacctatctgcccattccccaaatgtttaacgcggcgcttaacttcttcctgcttaccagcgttaaacggacgtgcatccgggctacctaaatatccgcacacgcggcgagttacgctcacacgggaggcgtcatggttaccacatttcgggcaagtgaagcctttgctggtgcactcgaactcaccggtaaagccacactcgtagcactcatcaatcggtgtattggtgccgtaatacggtacatgctgatagctgtaatcccagacatcttccagcgccttcaggttgtgctgaatgtttggatactcgccgtagcaaatgaaaccaccgttcgccagcggcgggtaaggcgcttcaaagtcgatcttgtcgtacgggttcaccttcttctccacatcgaggtggaaactgttggtgtagtaacctttatcggtcacgcccggcaccacgccaaactcagcagtatcgagacggcagaagcgatcgcacaggttttcactcggcgtgctgtagagactgaaaccataacccgtttcttctttccactgatccactgcctgacgcagacgttcaacaatggcgatacctttcgcgcgaagctgctcgttgtcgtaaacatgctcgccgccgaacagcgcgttaatggtttcgtggatgccgatgtaacccaggctaatagacgcacgaccgtttttgaagatttcagaaacatcatcgtcagcattgagacgcacgccacaagcaccttccatatagaggatcggggccacgcgcgctttcacgccttcgagacgagcgatacgggtcatcagcgccttacgtgccagcaccagacgttcatccagcagcttccagaaggtggcttcatcgccttttgcttccagagcaatacgcggcaggttcaggctgatcacgccgaggttgttacgaccatcgtggatctgctcgccgttttcattttcccacacgccgaggaagctgcggcagcccatcggagttttaaagctaccggtgactttcactacctgatcgtagttcaggatatccggatacatgcgcttgcttgcgcactccagcgccagctgtttgatgtcgtagttcggatcgccttttttatggttcaggccatcgcgaatcgcaaacaccagtttcgggaacaccgcagttttacggtttttaccgaggcctgcgatacggttacgcaggatgctttcctgaatcaggcggctttcccagctggtgcccaggccaaaaccaaaggttacaaacggcgtctgaccgttggcggtgtgcagggtgtttacttcgtactccagactctggaaggcatcgtagcactctttgatggttcgagagttagcgtagccttcggcgtccgggatgttccactcttctgcggtcttgcgatgtttgttgtagctggcagtgacaaacggtgccagcacttcatcgatacggttaatggtggtgccgccataaatatggctggcaacctgagcaataatctgcgcagttaccgcggttgccgtagagatgctcttcggcggttcaatctcggcgttccccattttaaagccctgggtcagcatgcctttcaggtcgatcaacatgcagttgaacatcgggaagaacggactgtaatcgagatcgtgatagtgaatatcgccacgctcatgtgcctgcaccacgtcacgcggcagcaggtgctgacgtgcatagtgtttagccacgatcccggccagcaggtcgcgctgggttggaatcaccttgctgtctttgttggcgttttcgttgagtaagctggcgttggtctgctcgaccagaccacggatctcctggttcaggcgaccgcgtttttcacgttcaatgtcgcgatcgtgacggtactcgatgtaagcacgagccagttgtttgtatggaccactcatcagctgattttcaactgcggtctggatctcattgatatccacctggttgcggccctgcatctgctcgctgacaaccgcggcaacagtggcgcaataatcggcatcatcgacttccgctgctttagctgcacgcagaatcgcttctttgatgcgctcacttttaaacggcactttgcagccgtctcgtttcatcacatgcggtgtcatgatcgctccatatttttaagaacaggttatccacagaaattgggaaaggcgttttccggttttttcgtttcgttttccggtgctttccgcaatcgccatccgcttatccacaacgccgcacctttttcgtggggagctgtagtagcaattatagtcgattaatacaacatattgggttgggacgcattttaaagtctatatatagtgctttgcatcaaggatgtttgagctttttttgatgtagctcaaagtaaaaagcagagcgtacggatgacgggcgctacagcgatatgtaaattttttaatgaatttgctggttgaaaaatcaacaaaaacaacatactgacagacaaaaccccggaatgaccggcattaccggggcttagggaagatttacttctgtaaccaccagacagcctcaaaaggccgtaaattcatggcacagggttgtggactggcttcttcgtagttatgcatcacaagctgccagttgccgcgcatttgccctgcctgccagggttggatctcacggctaaggttggcaatgaccagcaaggtttgccccttccattcacggcgatagcaccacaatacagggctgtttggcagcagatcctggtaattgccccatgtcaggatggcttcctgcttacgcagtgcgattaacttttggtaggtgtaaaacacgctggaatcatcggccagcgcggcttctacgttgatttgttgatagttatcgcccaggccaatccacggttcgccagccgtaaacccggcattatcgccgttgctccattgcatgggcgtgcgactgttgtcacgggatttactggcgaggattgccaataactcgtcggcatcacgcccatcgttgcgcagctcggcaaacatattgaggctctctacgtcgcgatagtcagtaatgcgcgtgaaatgcgggttggtcatgccaatctcttcgccctggtagatatacggcgttccctgcatgccatgcagcaccatcgccagcatttttgccgcaggcacgcggtattcaccttcatcaccaaagcgagaaacaatgcgcggctgatcgtggttacaccagaacaaggcattccatgctacgttgtgcattccttgttgccagtggcggaacaatgttttcaacgccacaaagtcaggtttagccagcgtccatttttcaccaccgggataatcgaccttcaggtgatgaaaattaaaggtcatgctcaattcactgcctgtcagagccgcgtatcgctggcaatgctcaaggctggtggaggacatttcacctacggtcattaacccgcgtggcgtaaacacatcgcggttcatctcgtgcaaaaactcgtgtgctcgtggcccgtcggtgtagaagcgacgcccgtcgccgtccaggtcttcagggaaacgcgggtctttggagatcagattcaccacatccaggcgcaacccgtcgaccccacgatcggcccagaactcacagacttttttcagctctgcgcgtaccgctggattctcccagttgagatccgcctgttctggtgcaaagagatgcaaatagtactgttcgctttccgcatgccagcgccacgcactaccgccaaatttactacgccagttgttcggtggcgtttctggttctccatcgcgccagatataaaactggcggtaagggctttctttgttcagcgcctcgcgaaaccaggcatgttgggtagaggtatggttaaacaccatatcgagaatgatacgaatcccgcggctttttgcctgcgtcaccagttcgtcaaaatcgtccagcgtgccgtaggtgggatcaatcgccgtatagttcgctacgtcgtaaccgttatcgacctggggagagacataaaagggggttagccagatggcatcaacgcccagtttatgcagatagtccaggtgttggataacgccacgtaaatcgccggtaccgctacccgtggtgtcctgaaaactctttggataaatctggtagataacgccgttttgccaccagtggggaagatgagtcattacgttattcctgcgaatgcgagggggcgcaattgcgccccgaagaaaattaaacaatgtccagcgtgcccaggcggtatttccgctgatagataaagctggtgagtacaatcgggatgatgatggcgatagccattgccagcgcaaacacctgccagtagctcggttgaatgctgagaattcccggcaggccgcctacgccgatgccattcgccataacgccgttcaggccgcatagcaatcctgccagaccagaaccaatcatcgcgcacagcatcgggaagcgatatttcaggttgatgccgtacattgcaggctcagtgaccccaagccaggcggagatagcggcaggcacggagatctcgcgttcattgtgcttgcggctggaaatgataatgcctatcacggcggagccctgagcgatattgctcagcgcaatcagcggccacactggcgtaccacccatgctttgaatcatctgcaaatcaatagcaagcgtggtctggtgtacaccggtgatcaccagcggggcgtacaggaagccaaacaatgctgcgccaatcggagcaaagctgccggtcatcaggtgacgtaccgcaaaggcaacgccatcgccaatcatgcgaccaaacggaccaatcagcgcatgggcgaggaacaccgcgaggatcaggctacagacgggtaccaccaccagatagaggtaatccggcacgatgcgtttaaggcgagtttcaataacgcccagcgccagtccggctaacagtgccgggatcacctgcgcctgatagcctactttggcgatgctgaacatgccaaagtcccacacttccggcagctgctgcccgagcagataagcgttcatcagctgtggagaaaccagtgtcacgccaagcacgataccaaggatcggcgtgccgcccatttttttcaccgcactccagcaaataccgaccggcaggtagaagaagatcgcttcaccgatcaaccacagaaaatcgtagatcgtttgcagggaagggtacatttgcgccagcgtctgaccgttgctcatgggcaaatcgccgatcacattgcgaaaaccgaggatcaaaccgccgctaatcaacgcgggcagcaacgggaagaagatcaccgcgaaatgagagatcaactgctcatgccatttcatattatgccgggcggctttttttacctgctctttatcaacctgcgcctgtccggtactcgcaatcagtgcttgatagtaatcacccacgttggtgccaatcaccacctgaaattgcccggcattggtgaaacagcctttcaccatagggagttgctcaatttctttcggtctggcattggccggttggttgaggacaaagcgtaggcgagtaatacagtggctcaccgtcgcaatattgccgcgcccgccgaccagttcaatcaaccgatcgatatccgtttggtttattttgctcatcataaagccccatggcagatgacatttttggttggctgcagaatatattgcgcggaaaaatttaaaaacgggaacgttcccgaaacgcagcgaagatcacaatttatcgttcaggaaacgatcaggacagggtggcggggatgatgatttgttgcggttcgctgcgcccggttacctgcgcgatcaactggcaagccgcctggcgtccagcttcggcgtaaccgggatctacggttacgatctccggatggaggaatttcattaacggcgtattaccgacgctcgccagttgcaaggtgtcgatgcgttgctcttgcaggtatttacttgcgccaagtgccagcgtgtcggttgcgcacagtaaggcggtagtttcaggcgtaatcacttttgcaacgttctcatagccttgcttcatagcaagccctggcagggcggcaacgggatgcagtttatgcgctttgcagaacgccaggtaggcttcgtgacgtcgcttaccggttgtcacgtcactgtgcggcacgccgagataactgatattacgatgcccctggtcatacagccgttgcatcaggattttgattgccccttcgtcgtcataacagacgctagcaaagccttttgcgtcacgcgccagcagaaccaggctactctgccagtgggctaacatttcttctgttatgccagtaaaaccgaacagcactacgccgtcgatattacgccgtttcagcactcccaaatgttcggcaactaattgcggggaaaactgactttccatcatgattgggtcgtaaccttgttcatagaacgctggcagcatggtttgaacggcgagattttcactcaagctatccagacgggtaacaatgatggcgaccactttatcgctttgcccacgcatagcgcgcgcagagcgggaaggggaaaatccatgctgattcatcactgcttcaacacgctcgcgggtgagctggctcacgccgctttcgttattcagcacccgggaaactgtagatttccccacgccgcttaagcgcgcgatatctttgatggtcagccgattttgcatcctgttgtcctgtaacgtgttgtttaattatttgagcctaacgttacccgtgcattcagcaatgggtaaagtctggtttatcgttggtttagttgtcagcaggtattatatcgccatagatgctacgaatattattggattctccttattatttgcggcgcttttttcacttaccggaggttatatggaacctgatcccacgcctctccctcgacggagattaaaacttttccggtaagcccgtcttttcacggcgttaccggatgcgtaaggccgtgacgttttaacgtccctgctcagctttattaccttcaggtaaggcttcgccacgcctgaagacatttctgtactgtttcagacagtgcggagggactccttatgtttaaagaaatttttacccggctcattcgccatttaccttcccgtctggttcatcgtgatccattgcctggcgcgcagcagacagtgaatacggtggtcccgccgtccttaagtgcgcattgcctgaaaatggcggtgatgcccgaagaagaattgtggaaaacgttcgacacccatccggaagggttaaatcaggcggaagtggaatctgcccgcgaacaacatggtgaaaataaattacccgcacaacaaccgagcccgtggtgggtacatttatgggtctgctatcgcaacccctttaatattttactcaccattctcggcgctatttcttacgccacggaagatttatttgctgcgggcgttatcgcgctaatggtcgctatttctacgttgctgaactttattcaggaagcacgttccactaaagcggcagatgccctgaaagcgatggtcagcaatactgcgacggtgctgcgcgtaattaacgacaaaggcgaaaatggctggctggagatcccgatcgaccagctggtgcccggcgatattataaaactggcggcgggagatatgatcccggcagatttacgtatcttgcaggcgcgggatctgttcgtcgctcaggcgagcttaaccggtgagtctctgcccgtagaaaaagccgctaccactcgccagccggagcacagcaatccgctggagtgcgacacgctgtgttttatgggcaccaccgtggtgagcggcacggcacaagcaatggtgattgctacaggtgccaatacctggtttggtcaactggcggggcgtgttagtgagcaggaaagcgagccgaatgcctttcagcaagggatcagccgcgtcagtatgctgctgattcgctttatgctggtgatggcaccggtggtgctgttaatcaatggttacaccaaaggcgactggtgggaagcggcgctgtttgcgcttagcgtcgcggtaggcctaacgccggaaatgttgccgatgattgttaccagcacgctggcgcgcggcgcagtaaagctgagcaaacagaaagtgatcgtcaaacatctggatgctattcagaactttggcgcaatggatattctgtgcactgataaaaccggcaccctgacgcaggataaaattgtgctggagaatcataccgatatctccggtaaaaccagcgaacgcgtgctgcatagcgcgtggttgaacagtcattatcagaccggacttaaaaacctgctcgatacagcggtgctcgaaggtacggatgaagagagtgcgcgcagcctggccagtcgttggcaaaaaattgatgagattccgtttgatttcgagcgtcgccggatgagcgtggtagtggcagaaaataccgagcaccatcagctggtttgcaaaggtgcattgcaggaaatcctcaatgtgtgtagccaggtgcgtcacaatggcgagattgtgccgctcgatgacatcatgctgcgtaagattaagcgggttactgatacgctgaatcgtcaggggctgcgcgtggttgcggtggcgacgaaatacctgccagcgcgtgaaggagattaccagcgggcggatgaatccgacctgatcctcgaaggatatattgcttttcttgatccgccaaaagagacaaccgctccggcactgaaggcattaaaagcgagtggaattaccgtaaaaatccttactggcgacagtgagttagttgcagcgaaagtgtgccatgaagtggggctggacgcgggagaggtggtcattggtagtgatattgaaacgctatctgacgacgaactggcaaatcttgcacagcgtaccacgctgtttgcccgcctgacgccgatgcataaagaacgcattgtgaccttactgaagcgcgaagggcatgtggttggctttatgggcgatggtattaatgatgcgcccgccttacgcgctgcggatatcggcatttctgtggacggcgcggtagatattgcccgtgaagcggctgatatcatcctgctggaaaaaagcctgatggtgctggaagagggggttattgagggacgtcgcactttcgccaacatgctgaaatacatcaaaatgacggcgagctctaacttcggtaatgtgttcagcgtgctggtagcgagtgctttcttgcccttcctgccgatgttgccgttacacttgcttattcagaacctgctgtacgatgtgagtcaggtggcgatcccgtttgataacgtcgacgacgagcaaattcaaaagccgcagcgttggaatccggcggatctggggcgctttatgatcttcttcggaccgatcagcagcatcttcgatattttgacgttttgcctgatgtggtgggtattccatgccaacacgccggaaacgcaaacgctgttccagagcggatggtttgtggtgggcttactgagccaaacgctgattgtgcatatgatccgcacccgccgtgtgccgtttattcagagctgtgcaagctggccgttaatgatcatgaccgtgatcgtgatgattgtcgggatcgcattgccgtttagtccgctggccagttatctgcaattacaggcgctgccgttaagctatttcccgtggctggttgcgattctggcagggtatatgacattaacccagttggtgaaagggttctatagccgtcgttacggctggcaataaagaataaactgggcacgatagccccgattcagattgtagacaaagtgagttttgttcatgccggatgcggcgtaaatgccttatccggccaacaaattcaataaattgcaggaatcacgtaggcctgataagcgtagcgcatcaggcgattttgcgtttgtcatcagacttaatccgggcatgatagcccggatttccatcaagattagcgacgaacagcgatcgcttcgatctcaatcttcacgtctttcggcagacgggcaacttcaacgcaagaacgtgccgggaaggtggcgttgtgttcggtgaagaaggcttcgtaagtggcgtttacggttgcgaagtcgttcagatcttttacaaacacggtagttttaacgatgtcgcccactttcaggccagcggcttcgacgatcgcttttacgttatccaggctctgacgtgcctgtgcagcgacgtctgccggtacttcgcccgttttcggatttaccgggatctgaccggaggtgatgatcatattgcccagatcaacgccctgtacgtaaggaccgatagctgccggtgcattttccgtcgcgatagttttgctcatgatttctcctttattacagcggtaaaaagtctggctcattatagggagccagacttttattaccaaccgcaattaattggccagcaccacattatgggaaaactctttttcacagtatttgcatttgagcgcgatatcattggcgcgttttcgcacggcaaagctggaactaaccggttcggcatggctgatacagttgctgttcgggcagaccagcacattgtcgatgcgctccggcagacttgggcggcttttacccaccacttcatagttgtcgatacggttaaccgtggcttgcggcgcatacaatgccagttgatctacttgatcttcactcaaaaaggtattttcgattttgatcagatctttgcggcccatctcgccagaaggcaggttcagaccaatggtgatgcgctgatccgtttcggtcagcttgaacagactcaacagcttaaaaccgatctgggcggggatatggtcaattaccgtgccgcgtttaatagcttcaacctgcaatttattatcgtgtgtcatctctatttccccttacagtaccagatcgcgattcagaaccagtgccagtaacgcctggcgagcgaaaatcccgttgcctgcctgctggaagtaccaggcgtgtggcgttttatcaacatccgtcgcaatctcatcaacacgcggcagcggatgcagcactttcatattggctttggcgttgtggagatcgctggcgcgaagaacaaactgcgctttcacgttggcgtactcggacgggtccagacgctctttttgcacgcgggtcatgtacaggatgtctacttccgccatcacttcttcaatagagctgtgcagactccatgcgatccctttttcatcgagcatatccagaatgtattgcggcattgccagcgcgtccggcgcgatgaagtaaaaacggttgccgtcgaacttcgctaacgcctgagtcagggagtgaacggtgcggccatatttcaggtcaccaaccattgcgacgtggagattgtccagacgcccctgggtttcctgaatagtgaataagtccagcaaggtttgcgtcggatgttggttggagccatcaccggcattcagtaccggtacattgccggaaaactcggtggccaggcgcgccgcaccttcctgcggatgacgcatcactatcgcatcgacgtaagtgctgataacgctaatggtatcggccagcgtttcgccctttttacccagacttgtattggcgctgtcggagaagcccaccacgctggcccccaggcggtgcatagatgtttcgaaagagaggcgggtacgggtagaggcttcgaagaaacagctggcaatgactttgtgcttcaacagctctggttgcgggtttgctttcagtttcgccgctgtcgccagcaccagattaaggtcatcgcgactaaggtcgtttatggaaatgatatgtttctgatatagcggattagccatcttttatctcctgacgcctgggcaaaaaaaagcccctcgattgaggggctgggaatgggtgatcaacgggaagaaaaacggcaggccagcgtcttttttcagacgcggtaagacaaaatgtcgaacacactgaaccatacatcctcccggcaaattgtccggcattatactcatcgtcagaagcggcgcaagcatttgatgcaatattttgtcagcgcaaacggtttatttgaattaaaagtcaaggtatatgcatttttatttgatgtgattctgcaggggaactgtccttcggtatcaataattgcagacattccctgctttttcctttttcactttcacgcaatcagatatgcattttattccattcatccgacttatagggcggagtgtgaaagcgaacggctaacactattgcttactgctcagggatgcgcgctatcactttaatttcaaaatcaaagcctgccagccatgtaacacccaccgccgtccagtttggataaggtggggcgctaaatatttcatttttcaccgtcatgatgtcttcaaattggttttctggatcggtatggaagctcgtaacatcaatgatatcgtcaaaagtgcatcccgcagctgccagggtcgcatgcaaattatcaaatgccagtctgacttgttgctgaaaatcgggttctggtgttccgtcctctcgacttcctacttgcccggaaacaaacagcaaatcgccggaacgaatagccgcagaataacgatgctcagcatatagactatgtcggccagcagggaaaacagcggttctttctaccatttggttatcctcaagatttacgacatgaacagaagatttctctttaccgggagccgcttttagcggacgacgtgagtaaacaaaacccagacatcatggataatggctgggcttaattgagcgtagtcggttatgcgccaaacgcgccatcaatggtatgcatcgcgccggtaacaaaactggcttctggccctgctaaccatgcgaccataccagcgacctcttccggttgcccatgtcttttgatagccatcaaactatgcaacatatcgcgcattggcccgttggcgggattagcgtcggtatcaattggccctggctggacgacgttaatggtgatcccacgcggtccaaaatcacgggccagcccgcgcgccatgccttgcagggcagatttgctggcggcataagcagccatgcctgcaacaggcatacgatcgccattcacggagccgatgattaagatgcgcccgccttcgggcatctgccgggcggcttcaacagaggcatgataaggagcatgaatattgattttgaaaaggcgatcaatatcgtcggcatttaattccagggcctcgccaaagacgccaatacctgcatttaccaccaggatatccaatgcgccgctcttacgaacgacatcaatgacagcgtctctgtcagcactatctgtgaatactgctgtcgctccagtctcttgtgccaggcgtttagcggcatctttgctccccgcataggtgaatcgtacattggccccatcggtgacgaaacgacgtacgatagcggcaccgataccacgactgccaccgaggatgagaactgtcttacctgtaaaagcgcccataaggactccttgatttattatgtaacatgcattacaaaactgttttaactttctgtcaacaggttttgtaatggtcactaaaaaacaatctcgcgttccaggtcgtcccagacgtttcgctcctgagcaggcaatctctgcggcaaaagtgctttttcaccaaaaaggtttcgatgctgtcagtgttgctgaagttactgattatcttggtattaaccccccgagcctctacgcggcttttggcagtaaagctgggttatttagccgtgtactcaatgaatacgtcggtacggaagctattccgcttgccgatattcttcgtgatgatcgtccggtaggcgagtgcctggttgaggtattaaaagaagcggcgcgcagatatagccaaaacggcggctgcgctggctgtatggttcttgaaggtattcatagtcatgatccacaagcgcgtgatattgccgttcaatattatcacgccgcagaaacgaccatttatgactacatcgccaggcggcatccacaacgcgcacaatgtgtgactgattttatgagtaccgtgatgtctgggctttctgcgaaggcacgagaggggcactctatagaacaactctgtgcaacagctgcaatggcgggggaagcgataaaaactattcttgaggagtgatgcgggccttgacccgaaaggcgggaaagcgcctgccgataagttgtgataagacaataattcacgcgttaaggctagcggaattgattatcttttcgtataacgatagaaatgaaacgttgttttaattaaggagtggaaaagatgatcatcggaaatattcataatcttcagccgtggctaccccaggagttacgccaggcgattgagcatatcaaagcacacgttacggcagaaacgccaaagggcaagcacgatatcgaaggcaatcgactgttttatcttatcagcgaagatatgaccgagccgtacgaagctcgccgtgcggagtaccatgcccgctatcttgacattcagattgtgttaaaaggtcaggaaggcatgaccttcagcacgcaacctgcaggcgcgccggataccgactggttagctgataaagacatcgcatttttgccggaaggcgttgatgagaaaacagttattctaaatgaaggtgattttgttgtgttttatccgggggaagtgcataaaccgctgtgcgcagtgggcgcgccagcccaggttcgcaaagcagtagtgaagatgctgatggcgtgatgacttttcgccgtaaataactcaaggtttacggcgagtttgtgaaaagagcgttttttgatatttttttgtgagtaaaatttgtaatgcttagacgttcttattcactcaaggagttcgtcatgagcaaaataagtgatttaaattattctcaacacattacattagccgacaattttaaacaaaaaagtgaagttttaaatacctggcgtgttggaatgaatgattttgcccgtattgccggggggcaggataacagaaggaatattctttctcctggagcatttttagagtttttggcaaagatatttaccctgggttatgtggattttagcaaacgctccaacgaagcgggtagaaatatgatggctcatattaagtccagttcttattctaaagatactaatggcaatgaaaaaatgaagttttacatgaataatcctgtaggggaacgagcggatagtcccaaggtgattatagaaattagtctttccactatcactactatggggactcgtcaaggacatacagccattatatttccacaacctgatggtagcactaaccgttatgaagggaagtcctttgaaagaaaagatgagagtagtttacacctgattactaacaaggttctggcgtgttaccaaagtgaagctaacaagaaaatagcgcgtctattaaataataatcaggagttaaataatctacagaaattaaataatctacagaagttaaataatctactgaagttaaataatatacaggggttaaataatcctcaggagttaaataatccgcagaatttaaatgattctcaggagttaaataacagccaggaattaaatagtccacaggagttaaatgatccgcaggagttaaataattctcaggacttaaataactctaaggtgagttgtacagttagtgttgattctacgattacgggtttattaaaagaaccattgaataatgcattattagcaataaggaacgaacatctgctattaatgcctcatgtatgtgatgaaagcattagttacttactgggcgaaaaaggtatacttgaagaaatagataagctctacgcattaaatgatcacggaattgataatgacaaagtaggtaacaatgaaattaatgacatcaaagttaacctgtctcatattcttattgattccttagatgatgcaaaggttaaccttacaccggtcatcgatagcattctggagacttttagtaaatccccatatattaatgatgtaagaatactggattggtgttttaataaaagcatgcaatattttgatgatactaaaaagataaagcatgcatgctccgtaataaatcatattaatcttcgcagcgatcagtctaaaatagctgagacattatttttcaatctcgataaagaaccctataaaaatagccctgaattacaggggttgatttggaataagttggttgtatatgtcaatgaatttaacttaagtaatcgagaaaaaacaaatttaatacaaaggctatttgataatgttgagtctatatttaatgaagtacctgtcagcattttagtgaatgatatttttatgaatgatttctttatgaaaaatcctgagatgattaattggtacttccctcagttacttaagagttatgagggtgaaaagatttattttgataatttaaaatatgatttaaatgataatgataaggaatctaataaagaaattttgaagaatcaaccagataatgttatcaaagaaaaactgaataatgaatacaaacttagatttagaatgatgcaaactatcttgcaaagcagagttaatgtattaccatatattaatgaacagcgtttaaataaactaaatccaccggaaaatttacgtatagcaatagaacactttgggtggaagaatagacctatcactgcataaaataatgtgatgccgggatggtttgtatttcccggcatctttatagcgatagcaattatttactgagcgtcgcgaccatcaccgctttgatagtatgcatacggttttccgcctgatcaaaaacaatgctggcggcagattcgaagacctcatcagtgacttccataccgccatgtaggccaaattcttccgccattttcttgccaagcgtcgtttggtcgtcatgaaacgcgggcaggcagtggaggaatttgacctccgggttaccggtcaactgcatcatcttgctgttcacctgatattcacgcagcaatgcaatccgttccgcccatttctcttttgcttcccccatgctcacccacacatcggtatagataaagtcagcaccttcaactcccttcgcgacatcttcagtcagcgtaatattcccaccattttgctgtgccagggcgcggcattccgtaaccagcgcagcttccggccagcacgcttgtggcgcgaccagacgcaaatccagaccggtaagcgccgcagcttcgagcatgctattgcccatgttgttacgcgcgtcacctgcatagaccagcgtcatttcgttgaacgctttgccgggcaaatgctcctgcatggtgagaagatccgccagcagctgcgtgggatggaactcattggtcaggccattccataccggcacgctagcgtattccgccagtgtttcgacaatctcctgaccatagccgcgatactgaataccgtcatacatgcgaccaagcacgcgggcagtgtctttaatgctctctttatgaccaatctggctgccgcttgggccgagataagtaacgcgagcaccctggtcatatgcggcaacttcgaaagagcatcgggtacgagtgctgtctttttcgaagatgagcgcgatgtttttaccagtgagtttggcttcttctttaccgcttttcttatcggctttcagcttcgcggctaactgcagcaggctgttgagttcagctggcgtgaaatcgagtaatttcaggaaatgcttatgataaaacccggacatagatccctcctgtggctaacgcctcaatgaattaaaattcaatttatatggatgattattcatttgcaagtctaaagcataaatctttgtcacaaaggtggaggcaatgtcagtggtgtgtgacaataagagtatcggcaggacattaagaggaatgagccatggcaaacccggaacaactggaagaacagcgtgaagaaacacgtttgattattgaagaattactggaagatggcagcgatccggacgcgctgtacaccatcgaacaccatctttccgcagacgatctggaaaccctggaaaaagcagcagttgaagcgtttaaactcggttacgaagtgaccgatccagaagagctggaagttgaagatggtgatatcgtgatttgctgcgacatcctcagcgagtgcgcgttgaatgccgatctgatcgatgcccaggttgaacaactgatgacgctggcagagaaatttgacgttgagtacgacggatggggcacttactttgaagatcctaacggcgaagatggcgacgatgaagattttgtcgatgaagacgatgacggagttcgccactaattaagcgtagcgcatcaggcccaggtagttcctgcaacctggtgaatttgtagcccggataaggcattcatgtcacatccggcataaacaaaacgtacgttgttaatgttcgaatgcccgcgagttgaacacgcgggcatttttttagagttcgcgcaacatccgcacttcacaatcgacatggcccgtgcagccaagcgcatagtcgatatgctcaaagcccaaatgctcataaagcgcaatggcttcctttaaaaaagcggtcgtttccagatagcagcgtttgaaacccatctctcgcgcctgctccatcgccattaaggccagtttttttgccagccctttgccgcggatagccggaagaaaatacatcttttgcagttcgcaaatatcgctctcactcccggttaatggcgctatcccaccgccgccgaccacttcaccctcgtactcaacgacccaatatgcatggccaggctgactatatacttgatacagctcgtcaagattcggatcggcgacggtgtagcctttatcagcggtaagaccgtattcggcggatacctgacgaatgacgcgggcgatagcaggattatcctgcagcgtcaggcgacgcattacaggactttgcggcgcaatgttattcatagtttaacccaataaaaataaagtaattatacatttgtttaataccactctcttcttacgtacgcaagcgacttataaagtaataaagtttttgccagcctattactgataagagtattgtaacgtggcagaacattttactgtctgtatatataagttatatcaatggattttttaattcagggaatttttatggctcaagttattaatgaaatggatgttccgtcccatagctttgtttttcatggtacaggtgagaggtattttcttatttgtgtggtgaatgtgttgttaacgattataacgctaggtatctatttaccatgggcattaatgaaatgtaagcgttatctttatgctaatatggaagttaacggacaacgattttcttatggaattaccggtgggaatgtttttgttagttgtcttttttttgtttttttctatttcgcaatcttaatgacagtgagtgcagatatgccgcttgttggttgtgttttgactttgttactgttggttttgcttatatttatggcagcaaaaggactgcgtcatcaggccttaatgaccagtctcaacggcgtaagatttagttttaattgctctatgaaagggttctggtgggtgacctttttcttgccgattttaatggccattgggatggggactgttttctttatcagcacaaagatgctacctgccaatagtagtagtagtgttattatatccatggttctgatggcaatagttggtattgtttccattggtatttttaatggtactttatatagtctggtaatgagttttctctggagtaataccagtttcggtatacatcgtttcaaggtgaaattagatactacgtattgtataaaatatgccattctcgcatttttagctttattgccttttctcgctgttgctggttatattatcttcgatcaaatattaaatgcgtatgatagttctgtatatgcaaatgatgacattgagaatttacagcaatttatggaaatgcaacgtaaaatgataatcgcgcagttaatctattattttgggattgctgttagcacaagttatttaacggtgtctttgcgaaaccattttatgagcaacctgagtctgaatgatgggcgtattcgttttcgcttaactttaacgtaccacggtatgctttatcgcatgtgtgcgttggtggtgatatccgggattacgggcggtctggcttatccactgctgaaaatatggatgattgactggcaggcaaaaaatacgtatttgctgggcgatttggatgaccttcctttaatcaataaagaagaacaaccagataaaggcttcttagccagtattagtcggggagttatgccttctttaccatttctgtaagagataaaaaaggccggagcatgctccggccttcgttttcatcactgtgttttgattacagcgcggcgataacagcctgctgttcaatcagtttcgctttcgcttccgcatagccttccagcttctcacgctctttcgcgatgaccgcttccggtgcgcgggcgacaaagccttcgttcgccagtttgttctcgatacggctgatttcaccttcaatcttcgccacttctttcgccagacgcgccagctcatcttctttgttgatgaggccagccatcgggatcagcagctctgcaccgtcgatgatcttcgtaacggaaaccggacctttgtcatcggcaggcagcacggtgatactttccagacgcgccagggtttgcaggaagccacggttttcatttacgcgacgttctgcatccgcgctgcaaccacgcagcagcagctccagcggtttgcccggcgcgatgttcatttctgcacggatgttacgtaccgcaacgatcgcctgtttcagccattcggtgtcggccagtgcggcttcatcaacctgagatgcatcgtactgcgggaacggctgcagcatgatggtgtcggcagtgataccgcaaagtactttcacacgctgccagatggtttcggtgatgaacggaatgatcggatgcgcgaggcgcagcagaccttccagtacagtcaccagcgtatggcgagtaccgcgcagttctgcttcggtgccaccgttcattaccggcttggtcagctcgagataccagtcacagaactggttccaggtgaactcatacagaatgcctgcggcgatatcgaagcggaagctgtccagcgcttcgcggtacgctttgatggtctggttgaactccgccagaatccagcggtccgccaggctcagcgtcatttcgccgccgttgaagccgcaatcctgaccttctgtgttcatcagcacaaagcggctggcgttccacagcttgttacagaagttacggtaaccttccagacgcttcatatcccagttgatgtcacgaccggtagacgccagcgccgccagggtgaagcgcagcgcgtcagtaccgtgcggctcaataccgttcgggaactgcttctcggtgcgcttacggattttgtccgccagctgcggctgcatcatattgccggtacgtttttccagcagttctggcaggctaataccgtcaaccatatccagtgggtcgataacgttacccttggatttggacatcttctggccttcgtcatcacgaatcaggccggtcatgtaaacggtgtggaacggcacctgcggtttgccattttcatctttgatgaagtgcatggtcatcatgatcatgcgggcaatccagaagaaaatgatgtcgaaaccagataccatcacgctggttgggtggaactgacgcagggcgtcggtattttccggccagccaagggtagagaaggtccacagcgcagaagagaaccaggtatcgagaacgtcttcgtcctgacgcaggacaacatcagcaccgaggttattttctttacgcacttcgtcttcgttgcggccaacataaacgttacccgcttcgtcataccatgccgggatacggtgaccccaccacaactgacgagagatacaccagtcctgaatatcgcgcatccaggagaagtacatgttttcgtactgcttcggtacgaactgaatgtcgccgttctcaaccgcttcaaccgccggtttcgccaggacatcggcacgcacgtaccactggtcggtcagcattggttcgataactacgccgccacggtcgccgtaaggaacggtcaggtcgtgcggtttaatttcttccagcaggccaagcgcgtcaactgcggcaacgactgctttacgtgcagcaaaacgctccagtttctggaactctgcagggatttcgctggaataaacgtcagattcgttacctttggtatcgaacacctgggcgctttcacggatatcgccgtcaaaggtcaggatgttgatcatcggcagggcgtgacgtttacccacttcatagtcgttaaagtcgtgcgccggagtgattttcacgcagccggtgcctttttccatgtcggcgtgttcgtcgccaacgatcggaatacgacggttaaccagcggcagaatgacatatttgccaatcagatctttgtaacgcggatcttccgggttaacggctacgccagtatcgcccagcagggtttctggacgggtagtcgcgaccaccagataatctttaccgtctgcggttttcgcaccgtcagccagcggatagcggatgtgccacatgctacctttgctttcgcggttttcgacttccaggtcagagatagcggtgcgcagtttcggatcccagtttaccaggcgtttgccacggtaaatcaggtcttctttatacagacgaacgaaaacttctttcaccgcattggacaggccttcgtccatggtgaagcgttcacgctcccagtcgacggagttgccgagacggcgcatctgacgggtaatggtgccgccagattccgctttccattcccagattttgtcgatgaaagcttcgcggccgtagtcgtgacgggttttaccttcttctgcggcaatcttgcgctcaacgaccatctgggtagcgatcccggcgtggtcagtaccgacctgccacagggtgtttttgccctgcatgcgctgatagcggatcatggtatccatgatggtttgctggaaggcgtgacccatatgcaaactgccggtgacgttcggcggcgggatcatgatgcagaaactttcctggctttcatcgccattaggcttaaagtagccctgcttttcccagtgctcgtaaagcggctgttcgatatcttgtgggttatatgtcttttccattatttccaggttgccgtattcaggttgaaaccagccacgcggtaggctttatagcgttcgcgcgccagttgtttcagagaatcttcataaggaacgaagtctaccacttctgtgaaagcggtggcaaaatctgcaaagcttgttcgcagactaatcaatatatcgcgccggctgctgctacgcttttgcggccaggcgatctccaccggtgcaccgccgcgcggtccttctcccgctaaattatgcggaacaaagctttctgccggacgcgcccacagggcttcatccagccggtaagcctgcttttcatcttcacaggcgatgagcacgcgcttaccgctgcgccaacgttctgcggcaatttcacacaccagttgctcaacggcgcttaagccatcgacggtggtgtcattgtccagaaggtagaacgtcgcgtttttcataaatggggcttcttgtggtggatttaaatacgcatcaggtatacaccgcagcgcctgatgcgacgctgttgtgtcttatcaggcctacgagttcagtgctgtgtaggtcggataaggcgttcacgccgcatccggcaataacagccttgcctgacgcaattactcttcgccgttaaacccagcgcggtttaacaggaactgtgccagcaacgctaccggacgaccggtggcgccttttgctttaccagaacgccaggcggtaccggcgatatccaggtgcgcccagttgtacttacgggtaaagcgactcaggaagcaacctgcggtaatcgccccaccaggacgaccgccaatgttcgccatatcggcaaaattggactccagttgttcctgatactcgtcacccagcggtaagcgccatgcgcggtcaccggattgttcagacgcggcaatcagttcatgggccagcggattatggttcgccatcagaccagtaatatgatgacccagcgcgatcacgcaggcaccggtcagcgtcgccacgtcaatcaccgcttccggctcaaaacgctcaacgtaagttaacacgtcgcacagtaccaggcggccttcagcgtcggtgttcagcacttcaacggtttgaccggacatggtggttaacacatcgcccggacgataggctcgtccgccaggcatgttttcgcagcctgccaacacgccgataacgttaatcggcagttgtagctccgcgaccatccgcatcacgccgtaaaccgctgccgcaccgcacatatcgtacttcatctcatccatgccttcactaggcttgatgctgataccgccggagtcgaaggttaaacctttacccaccagcacgattgggcgtgcatcttcgctcgcgttgcctttgtactcaatcacgctcatcaggctttcgttttggctaccctgaccgaccgccagataggaatgcatccccagctctttcatctgctgttcgccgataacgcgggtgatgacattcttgctgtagctgtcagccagctggcgcgcttgactagcgaggtaagcggcgttacagatattcggcggcatattgccgagatcttttgctgctttaatcccggcggcaatcgccagaccgtgctggatcgcgcgctcaccgctggtcagttcacggcgggtcggcacgttgaacaccatcttacgcagcggacgacgcggttcgctcttgttcgttttcagctgatcgaaactgtagagcgtctcttttgccgtctcgacagcctgacgcactttccagtagttgttacggcctttaacgtgcagctcagtcagaaagcagaccgcttccatactgccagtatcattcagcgtattaatggttttctgaataacctgcttgtactgacgctcatccagctcacgttctttgccgcaaccaataaggagaattcgctcggaaagtacattcggaacatggtgcagcaacaatgtctgccccggttttccttccagttcgccccgacgtagcagggcgctgatgtacccatcgctgattttatcgagctgttctgcaatcggagaaaggcgacgtggttcgaagacgcccacgacgatgcaggaactccgctgtttctccgggctaccgctttttacactaaactccatgcactacgctcctgaatcttaaagacaacggcggtggctacagatagaattgcaagctttcgtaactcatgtccgctgttgcgatgacttcgtgttaatcttaacgttattacggcattggcacgtcagaacaaaatctgagaggtgaatccgttgagtataattatcttagcgacgatttcgacgactcaagagaataaatgacgtttaagccatgaaacaagctaaaatcctgcaaaagacgagtttttacgggcgtatttaaagtgataatcataagatatctggtgcgggagacgctcaaaagccagctggcgatactcttcatcttgcttttgatcttcttctgtcaaaagttagtgaggatcctcggcgcagcggttgacggcgatattccggcgaatctggtgctctcccttctcgggttgggcgtgccggaaatggcgcagcttatcctgccattaagcctgttcctcgggctgctgatgacgctgggcaaactgtataccgaaagtgaaattacggtaatgcatgcctgcggcctgagcaaagcggttctggtgaaagcggcaatgatccttgcggtattcacggcaatcgtagcggcggttaacgtgatgtgggcgggaccgtggagtagccgtcatcaggatgaagtgttagcagaagcgaaagcgaaccctggcatggcggcgctggcgcaagggcaattccagcaagcgactaatggcagcagcgtgctgttcatcgaaagcgttgacggcagcgatttcaaagatgtgttcctcgcgcaaattcgaccaaaaggtaatgcacgtccttctgtggtggtggccgattccggacatttaacccagctgcgcgacggctcccaggtcgtcactctcaaccagggaacgcgcttcgaaggcactgcattgttacgtgatttccgcattacggacttccaggattatcaggcgatcattggtcaccaggcggtggcgctcgacccgaacgataccgaccagatggacatgcgcacattgtggaacactgacaccgatcgtgctcgcgcagaactgaactggcgtatcacgttggtattcaccgtgtttatgatggcacttatggtcgtaccgctgagcgtggttaacccacgtcagggacgcgtactgagcatgctgccagccatgctgctgtatctacttttcttcctgatccagacctccctgaaaagcaacggcggtaaaggtaagctggacccgacgctgtggatgtggaccgttaacctgatttatctggctttagcgattgttctcaacctttgggacaccgtgccggtccgccgcctgcgcgccagttttagccgtaaaggagcggtgtgatgcaaccttttggcgtacttgaccgctatatcggtaaaactattttcaccaccatcatgatgacactgttcatgctggtgagcctgagcggcattatcaagtttgtcgatcagctgaaaaaagccgggcaggggagttacgacgcgttaggcgcaggaatgtataccttgctgagcgtgccgaaagatgtgcagatcttcttcccgatggcggctctgcttggggcgttgcttggtcttgggatgctggcgcagcgcagcgaactggtggtgatgcaggcttctggttttacccgtatgcaggtggcgctgagcgtgatgaaaaccgccattccgctggtcttgctgacgatggcgattggcgaatgggtcgcgccgcagggcgagcagatggcgcgtaactaccgtgcgcaggcgatgtacggcggcagcttgctctctacccagcaaggcttatgggcgaaagatggcaacaacttcgtctacattgagcgggttaaaggtgacgaagagttaggtggcatcagcatttatgcctttaacgagaatcgtcgtctgcaatccgtacgctatgccgctactgcgaagtttgacccggaacataaagtctggcgtctgagccaggttgatgaatctgatctgaccaatccgaaacagattaccggtagccagacggtgagcggcacctggaaaaccaacctcacgccggacaaactgggcgtggtggcgctggacccggatgcactctctatcagcggtttgcacaactatgtgaagtatctgaagagcagcggtcaggatgccggacgttatcagctcaacatgtggagcaaaatcttccagccgctatctgtggcggtgatgatgctgatggcgctgagcttcatctttggcccactgcgtagcgtaccgatgggcgtgcgtgtggtcaccggtatcagtttcggttttgtcttctacgtactggaccagatcttcggcccgctgacgttggtttatggcatcccgccgatcatcggcgcactgttgccaagcgccagcttcttcttaatcagcctgtggctgttaatgagaaaaagctaaccgaatgaacgaataaagggagcgaaagctccctttattattgttagcaaagtgtgcttcgttcattcctgaaaaataattaaaattcaatatattgcagtggggtgggcatgataagacgcgccagcgtcgcatcaggcaaagacaaatctcgcctgacttaccttcttctcccccccagcaaactccccaacatcccgcgtacaatctgattcgtcacttggcgagcggcgcttttggccattgtttgcaccacaccatctttcttcccgccgcgtggtccggtagtgccgaacaaaatatccttcaatccaccaagaatgccgtcatccaccgctacctctttccctttcgcgggaggattattttgctgctcggtactggcctgaaagcctttttgcaacatctcataggcggattcccggtccacctcatcctcatatttgccatacaccggagagtgattaatcaagccattacgctcatcttccgtcaccggccccatccggctacaaggcgcgatcaccatcgcacgctccaccacagaagggcttcctttcgcatccagaaaagagatcaacgcctcgccggtgcccagttcctgaatcgccttttcggtatcaaacgccggattggcccgcatggtttgcgccgctgccttcactgctttctgatcttttggcgtaaaagcccgcaaagcatgttgaacgcgattaccgagctgcccgagcacattatccggaatatcagacgggttttggctaacgaaccagacgcccacgcctttactgcgaataagccttatcacctgctcaatcttatccagcagtacctgcggggcatcgttaaacagcagatgtgcctcgtcgaagaaaaacaccagttttggtttctccagatcgcccgcttccggcaattgttcatacaactcactaagcatccacagcaggctggcggcgtacagtttcggcatctgataaagtttctcggcgctgaggatattgataacgcctttaccgttggcatcggtgcgcatccagtctttgatatccagcatcggctcaccaaagaagtgtgctgcgccttgctgttccaggctcaacagcccgcgctggatggcaccaacgcttgcgctactgatattaccgtactgattctggaaggatttggcgttatcgccgatgtactgggtaattgcccgcagatctttaaagtcgagcagtaacagcccctgatcgtcagcaatgcggaagatgatattcagcacgccagattgcacatcgttgagattcaacagtcgtgccagcaacagcggccccagatcgctaaccgtcgcccgcaccggatggcctttctcgccaaagatatcccacaccaccaccggattggcatgcggttgccagtcattgacgccgatatttttaagccttgcgagcagtttttcgctcaccgttcctgcctgcgcgacgccggtcagatcgcctttcacatcagccataaacaccggcacgccgatttcgctcaaactctccgccagtttttgcagcgtaacggttttacccgtccccgttgcgccggtaatcagcccatgacggttagccattcccggcagtaaaaacagttctgtgtccggcgtgcgggcaattaacaggggttcactcatgagatatcctccagtttcctgcctggagtataggcaacgtccggcaaagagaatacgtgtaatgaagagaaaataacttaaagcgtgttgccgtgataaatctgatacccgaggtcaacagtgttgtggttgtgatcgttatttttaattttgctcagcaacatttgggcggccatccgaccaatatcaaaacggggagtaattacgctggcgaggcttgggatcatttgcctgccaatctccagcccatgaaaacccgcaatggaaatttgttctggcacggcgaggtttcgctcgcggcacagcagaagcgcacccatcgcaatatcgtcattggtgcaaaatacaccgtctaaatccgggtttgcgctaagggcatcacgcattaactgcattcctaaatgaatggaactgatggcgcgtggattcatgcgtaatggggaaagattatgcagcatcatcgcatcgcaatacccctgataacgctgttcatcgcgggtgtcatctttggaaccgagatacagaattttgtgcctgactcgcttctccagcatggtacacaccatgtcaaaagcggcctgccgattatcaaaaccgacctccatatccagccgttctccctgtacatccatcaattccacgaccggaatggtggcactacgcagaaatttcaccgtcctgatggtgtgatatttttcgctaagtataatcccgtcaatgttataagagagcaggttaatcacgctctcttcttcggaatcgcgatcgtaattgtaattagcaataagggtctgataattatgctcagaggtgacggattctattcccgcgagaatgtcagcgaagagttgattttgaaaactcggaatcaagataccgagggtataactttgtgcattcaacaacatgccgggagcgcgattagggatataattgatctcttccataattttggcgatgcgctcgcctgtttcctttgccacctttttcgggctgcggatataacgactcacggtcatttttgttacgccagccagcgtagcgatatcctgtaaagaaattctgtgattgcgcataacttctcccaacgtcgggggaatcttcaatcttcccccgaaactacatcacaatattttattctttcagtgcaatacggcgttaatggctaacacgcccagcaaacccataatagaaataagggtttccatcaccgtccaggtacgcaacgtttcaccaaccgtcagattaaaataccctttaaatagccagaagccagggtcgtttacgtgactcgcgatcacgctgcccgcaccggttgccagtaccattaaagcgggatcggcatgggtaacgttgataatcggcaacaccacacccgcggtggtaatggccgcgacggtggcagagcccagagcgatacgcaacagcgccgcaacagtccagcacatcaataacgggctaagtgtagttccggtcattaagtgactaatatagtgcccgacaccgctatctactaatacctgcttaaacgcgccgccgccagcgataataaacacaatcatcgcgatagcgcctatagaatccccaatgatatccatgatttgctcgatggtgcgtccattacgtcggcccagtgtgaaaatcgcaataacaatggcaataaacagcgcaacggcagggttaccgacaaattcaaagaagaggcgcacggtgttagttttcggtaacgtaatttcacaaacggcggcgatagccatcaggatgaccgggatcacggcagcgaaaatactgttccagaaggagggcatctcctcttcgctaaacagatgaggattaaataagccttccggtggtgctttctcaaagcgagttagcagtttagaaaacagcggtcctgcgacaataactgtcggaatggtaatgataaatccatacagtaaagtcgttccgagattagcctcaaagatagtcgcgatggcagtaggccctggatgtggcggcagaaaacagtgggttacagagagcgctgctaccattggtacgccaacatacaacaggggtaatccactacttgctacgatggtaaataccaacggcaacagcaggacaaaacccacttcaaaaaacatggcgaggcccacaaccagaccggtgatcactagcgcccattgcacgcgttttttaccaaaagtagcaatcagcgtagtggcgatacgttgtgccgcacccgtatcagaaatcagcttgcctaacatggccccgaaaccgaggatcattgccagcccgccgagcgtgctgccgataccattttgtatagagtgcaggacggcctgtgcatccatcccttcggcaaatccgacgacggcagctaccagaacgagggcaataaagccgttaactttaaagccgatcatcaggataagaagcagcgcgacgcctgccgcaataatgattaatggcatagtctttatctcttattagtgccagaaaagcagcgctttcgcgctgcacgtaggggggctgttaaacagccactaacatgccgccatcaacaaacaacaggtggccgtttacgaaatcagaggctttactagaaaggaacaccgcagcaccaatcagttcctgcggatctccccagcgtgcggcgggggtccgtttgcacaaccaggcggtgaaggcttcgtcctcaaccagtgctttagtcatttctgttttgaaatagcccggcgcaataccgttgacctgaatattgtggcgcgccagctcgacgcacatgccgcgggtgagcatttttaccgcccctttgcttgcggcataaggggtgatggtgtcacgtcccagttcgctttgcatgctgcaaatattaataactttacctgccttgcgttcaaccatgtgacgagttaccgcttggcttaccaggaacacggcggtctggtttactgcgatcacatcattccactcttgttcagggaactcagtaaaaggatgacggcgctggataccggcgttattcaccagcacatcaatggggccgatgtccttttcgatatgttcaacggcggcatcaatttcatgtttatgagtaacattaaaaggtgcggcaacggcctgaataccctcctggtggagtttttctacagcaagttctgcgcgttcggcagtaatatcattaataattatttgtgcgccatatttacccaggccggttgccagtaaaaagccaatgccctgtgcactaccggtaatcaagatattttttcctgccagactaaatagatcgttcattgtattattcctttatttatctcttagaaaacaagctggacttttgctgcctgggttttatcaccggcgaaacgtagcgcctcttccaggtcagtgaagggatattcagcactcagtaaaggcagtggattgataacgccattcgccagccaactcactgcggtattaaattcgctggtaaaacggaaagagcctctgagactaatctccttaccaatcaacgtcatcattgggaattctgccatcgcgcctcccatacctacctgcaccattacgccgcgtgcacgagtgacctccagacaggtattcacactactaggatgaccggacacttcaaagctgacatcgaaatagcctttttccgctttccagtgatccatgtcgtcgttttgtgggtttacgagcacatccgcccccatctctttgcccaggctaagggaacggggactcacatcagcacagacaatttccgcggcccccagtgttttcactgcactgacaatcaggcagccaatgggtccaacaccggaaataaatactcgcttgccctgtaactcgccggcctgatgtgcggcatgaatcgcgacggctaaaggttcggcaaaagccataaccttttcgtcagctttggccggataagggacacattggctcgtttcgaccattttataacgggtaaaaccaccatcaacatgagggaaatacatggcactgccaaaaaaacgcatatctgtacactgattctcgttatgttcaatgcagtatttgcagtgaccgcacggtttagacggattaatggctaccgtttgcccttcatgtaattcactactgtcgctatgaataactttaccgataacttcatgacctaacaccatcggtgcctttatcatgaaattacctacttttccttcctgataataatgtaaatcggaaccgcaaattccacctcgggttatttgtactaatgttccattattattccaatctatcgtctgctcggtaacggcaacagttttcttgcccgcaacaacgcaggactgtgttttcacttgcataaattcctcactggtcaggtagacacctcggaagcatttaagcggttttaactgtcattatttgtgatgaagatcacgtcagaaaattgttacattactatgttacgcataacgtgatgtgccttgtaattcttatcagtagaaataaaaaaacgtgaaattattatgccgccaggcgtagtatcgcagcaggtaagatgattcaggagattttaaatggcgggtgaaagctttattttgatgggcgttagtgggagtggtaaaacattaattggtagcaaggttgccgcgttattatctgctaaatttattgatggtgacgatcttcatccagccaaaaatatagataaaatgagccagggtattccattatctgatgaagatcgacttccctggctggaacgcttaaatgatgctagttacagtctttataaaaagaatgaaacaggatttattgtctgtagtagtttaaaaaaacagtatcgtgatattttacgcaagggtagcccccatgttcatttcctctggttagatggcgactatgaaactattctcgcgcgaatgcagcgtcgggctgggcattttatgccggtagcgttactaaaaagtcagtttgaggcactggagcgtccacaagcagatgaacaggatattgtgcgcattgatatcaaccatgatattgccaatgtcaccgaacaatgtcggcaggctgtgctggcgatacgacaaaacagaatatgtgcgaaagagggcagcgccagtgatcagcgctgcgaatgattttcaaaaatcggctttcaacaccacgcggtaacgcgccttaccgtcgcgcacatgctggatggcgtcgttaattttgctcatcgggaacagttcggtggtcggcgcaaccttgctgcgggcggcaaaacgcatcagcttacgcagctcataaggcgtgccggtagcagaaccagagacgctgcgatcgcccgcaattaacgtaaaggccggaacagacagcggcgtgagaaccgcaccgaccgtatggaaattaccgccataggtcagcgcctcaaaatagggctgccagtcgaggctgacgttgacggtgttgataatgagatcaaactgccccgccagtgctttcagtgcctgcggatcgcggctattcaccactttatcggcacccatcgccagcacttcctgctctttcgccggattagaactaaaggctgtcacctcgcatcccattgcgtgcagaagttttatagcgatatgccccagcccgccaataccaattaccccaacgcggctggtagcagtgatatggtgcatcaacagtggtttaaagaccgtgataccgccgcacaacagcggcccggcggactcgatatcaatattttctggcagtggaatcacccattgccagtccgcacgcaacttctcggcaaagccaccgcgattcataatcgtcggcaccgcaccttgctcgcagttgatctgattaccgctaatacaggcgtcgcagtgaccacagctacgcgccgtccagccaatcccgacacgctgaccgacctgcaaacctttatcctgcgcggcgctcccgagtgccaccacgcgcccaatcacctcatgcccggcaaccagcggatattgactaaatccccattcgttatcgatcatgctcagatcggaatggcagatcccgcagtaatccacctgcacttcaacatcttgtggcctcagctcaccgggatcgtactcataaacttccagttcgccgcccgcttcttttgcggcatagctttttatcatgctcattttttggtccttctctggtgttgtttgggaagtgtagagcatggcagggcggggtgcctggagtgtgacaaaggttacacatcgctgtatgcaatgctgaaaatttcagcacttagcgaggtgcgagcaagctggcgcttgcatggtggcgtgcgacaggtataatccacaacgttttccgcatacctcttcagtgccgaagtggcgaaatcggtagacgcagttgattcaaaatcaaccgtagaaatacgtgccggttcgagtccggccttcggcaccaaaagtatgtaaatagacctcaactgaggtctttttttatgcctgaaatccagtgtttatctatctttcccgctatattaactctctcaaggtcaaccgatatcaacgtacatctaccaacatatgttggtacagatgatggtatttccggttcgataatgcttgtaccaacagggagggaatacgagaaatcacaggacattgctaatgctggtacgcaatattacctgaagctaaaaacctgcacgttagccctttgtaggccagataagacgcgtcagcgtcgcatctggcataaacaaagcgcactttgctggtctgttcccctcaccctaaccctctccccggaggggcgaggggactgtccgggcacatttttagactttgtcatcagtctgagcctgccattggcaggctctggtgtccttttacgctaccatgctaataatcagcacaataatcagcccaaccacggagttgaccagctccagcagaccccaggttttcaacgtgtcttttacactcaggtcaaagtaacctttgaacaaccagaaagatgcatcgttaatgtgggtgagggtgttggaacccgcagccgtcgccagtaccagcagcgccggattcacgccaaccagctgaccagttgctggatctaggattgcagcactgataatcccggcggcggtcatcgcgctaacgacaccctgacccgtcgccagacgaattagcacagtgatcagccatgccatgatgtaggggctgatattgccgtgggacatcaacatgccgatggtgtcgccaatgccggtgtcgatgatggtctgcttcagcacgccacccgcaccgatgatcagaatcaccattgcaatactcttcaccgcgctttcaaaagcgttcatcacccactgcatgtcatgaccacgtgcggtgccaaagagtacgaatgcaaccaccatcgcaataaacattgcaatcgggctggaaccgataaagttaaccacttcccaggcaggggtatcttttaccagccagatattggcgatggtggtagagatcataatgatcgccgggatcagcggcaccagaatgctaacgccgaaagagggcagattattcatatctaccggttgatctgctttcaggaaacttggcgttgggcgctcaagattgccgaggaacttcggcaggatcagacctgcgcagattacacttgggatcgtcaccagtacgccatagatataaaccatccccatatccgcgccataagcattcaccagcgccaccggacccggctgcggtgggaacagactatgtgcggtagtggcagctgctactgccgggatcgccagtttcaggaacggaattttagcttcggcggcaataacaataaccagcggcgctaacatgataaaggccacttcatagaacatcgccagaccaaaaatcaggccgatgataatcacgctcagctgtacatagcgcagaccgagacgcgccagcagcgtatgcgctatctggtgagccgcgccggagtcgaccatcaatttaccgatgaccgcaccgaacaccacgatgatagccagttcccccagcgtgttgccgaagcccgctttcatagtgtgcagcaggctcatcaaatccatgcccgccagcatcccgacggacagcgccgccaccaacaaagccaccatactattgattttgaacttcaaattcagtaccagcatcagaccaatgccgaataccacccagagaatgttaagcacatgcataacgttttaccttacctggttgaaccgttgttattttgggcgatatgttatgtaaattggtcaaccattgttgcgatgaatgtcacatcctctgatcaataaccatcgattaccctttgctgcaatttgcagcaacaaccatgagagtgaaattcttgtgatgtggttaaccaatttcagaattcgggttgacatgtcttaccaaaaggtagaacttatacgccatctcatccgatgcaacgccacggctgcggtctggttgttcatccggatacctaaacaactccagggttccgcgtctctttgctgtggaacccactatgtgaaagaggaaaaatcatggaacagacctggcgctggtacggcccaaacgatccggtttctttagctgatgtccgtcaggcgggcgcaactggcgtggttaccgcgctgcaccatatcccgaacggcgaagtatggtccgttgaagagatcctcaaacgcaaggcgatcattgaagacgcaggcctggtgtggtctgtcgtagaaagcgtgccaattcacgaagatatcaaaacccacactggcaactatgagcagtggatcgctaactatcagcagactctgcgcaacctggcgcagtgtggcattcgcaccgtgtgctacaacttcatgccggtgctcgactggacccgtactgacctcgaatacgtgctgccagacggctccaaagctctgcgcttcgaccagatcgaattcgctgcattcgaaatgcatatcctgaaacgcccaggcgcggaagcggattacaccgaagaagaaattgctcaggcagctgaacgcttcgccactatgagcgatgaagacaaagcgcgtctgacccgtaacatcattgctggtcttccgggcgcggaagaaggctacaccctcgaccagttccgtaaacacctggagctgtacaaagatatcgacaaagcgaagctgcgcgaaaactttgccgtcttcctgaaagcgattattccagttgctgaagaagtcggcgtgcgtatggctgttcacccggacgatccgccgcgcccgatcctcggcctgccgcgcattgtttccaccattgaagatatgcagtggatggttgataccgtaaacagcatggcaaacggttttaccatgtgcaccggttcctacggcgtgcgtgctgacaacgatctggttgatatgatcaagcagttcggtccgcgtatttacttcacccatctgcgctccaccatgcgtgaagataacccgaaaaccttccacgaagcggcgcacctgaacggtgacgttgatatgtacgaagtggtgaaagcgattgttgaagaagaacaccgtcgtaaagcggaaggcaaagaagacctgatcccgatgcgtccggaccacggtcatcagatgctggacgacctgaagaagaaaaccaacccaggttactccgcaattggtcgtctgaaaggcctggccgaagttcgcggtgtcgaactggcgatccagcgcgctttctttagccgttaatatccaccggcatggctgcgcgccgtgccggttccttcttccttgccgtcactctttgaagacggattctggagtttacgatgactactattgttgacagcaatctgccggttgcccgcccgagttgggatcattctcgtctggaaagtcgcattgtgcatctcggttgcggggcgtttcaccgcgcgcaccaggcgctgtatacccatcatctgctggaaagcaccgacagcgactggggcatctgcgaagttaacctgatgccaggcaacgaccgcgtgctgatcgaaaacctgaaaaaacagcaactgctgtacaccgtagcggaaaaaggcgcagagagcaccgagctgaaaattatcggtagcatgaaagaagcgctgcatccggaaatcgatggctgcgaaggtattctcaacgcgatggcgcgtccgcaaacggcgattgtctctctaacggtcacggaaaaaggctactgcgctgatgcggcaagcggtcaactggatctcaataacccgctgatcaagcacgatctggaaaacccgactgcgccgaagtccgcgattggttacatcgtcgaagcgttgcgtctgcgtcgtgaaaaagggttgaaagcgtttacggtgatgtcctgcgataacgtgcgtgaaaacggtcatgtggcgaaggtcgcggtactggggctggctcaggcgcgtgacccgcagctggcggcatggattgaagaaaatgtcaccttcccgtgcaccatggttgaccgcatcgttccggcggcgacgccagaaaccttacaggaaattgctgaccagctgggtgtttacgacccgtgcgccattgcctgcgaaccgttccgtcagtgggtgattgaagataacttcgttaatggtcgcccggattgggataaagtgggcgcacagttcgttgcagacgttgtgccgttcgaaatgatgaagctgcgtatgctgaacggcagccactcttttctggcgtacctcggttacctcggcggctatgaaaccattgccgacaccgtgactaacccggcttatcgcaaagcggcctttgccctgatgatgcaggaacaagcgccaacgctgagcatgccggaaggtacagacctgaacgcctatgcgacgctgctgatcgagcgtttcagcaacccgtctctgcgtcaccgtacctggcagattgcgatggacggcagccagaagttaccgcagcgtctgctggacccggtgcgtctgcacctgcaaaacggcggcagctggcgtcacctggcgctgggcgtggctggctggatgcgttacacccagggcgtggatgagcagggtaatgccattgacgtggtcgacccgatgctggcggagttccagaagatcaacgcgcagtatcagggcgcagaccgcgtgaaagcgctgctgggcctgagcggtatttttgccgatgatctgccgcagaatgccgactttgttggcgcagtgacggcggcatatcagcagctgtgcgaacgcggtgcgcgcgagtgtgtggctgcgctgtaactaactgattaccctacagacttactggtcaatcaaactgatatttggttgaccagttttcgtttttttgcccacctgtacgtgccaacttccagtgctaatggtatagtttgagattaacgggggccgtaaaattgcccgttgtaggccggataaggcgttcacgccgcatccggcaaaaatttgattaaccgcacctaacggacacaacaccatgaaatctgccacctctgcgcaaagaccttaccaggaagtcggggcgatgatccgcgatctgatcataaagacgccgtacaatcctggcgaacggctgccgccggagcgtgaaattgcagaaatgcttgatgtcacgcggacggtggtacgtgaagcgctgatcatgctggagatcaaagggctggtggaagtacgccggggtgccggtatctatgttcttgataacagtggcagccagaacacagacagtccggatgccaacgtctgcaacgatgccggtccttttgagctgttacaggcgcggcagttattggagagcaacatcgccgagtttgccgctttgcaggctacccgcgaagatatcgtcaaaatgcgtcaggcattgcaactggaagagcgtgaactggcttccagtgcgccgggcagcagcgaaagcggtgacatgcagttccatctcgctattgccgaagcaacgcataacagcatgctggtggagctgttccgtcagtcctggcagtggcgggaaaacaatccaatgtggatccagttgcacagccatctggatgacagcctgtatcgcaaagagtggttgggcgatcacaaacagatcctcgccgcgttaatcaaaaaagatgcccgagcggcgaagctggcaatgtggcagcatctggaaaacgttaagcaacgtctgctggaattcagcaacgttgacgatatttattttgatggctatctgtttgatagttggccgctggataaagtcgacgcctgacttattataataagcgcaagggtaaacgttccttgcgctttcttaaattaagaagtcgcaatgagtattactttgtaaattgcagggtattgtttagctatctgtataacctgaatgttagtactcattcttcctggtagtaaggcgagattattaaagttgccatgcagcgtccggggaagtgttgggcgctgttttttttgtttcttaataatgtgttgtaagccgtagaaggcgtgtaggtcgcaccctatgcgacctacacatcagtcaggaattacccttcacgttctaccactttaatttccaccatgccgatcccgagcttacgcgggctgtgtccgaggatattcccttcgttggtactgacaggttccggcggcacaattaccagtgtgtcggcatcggttgggttatcgaaatgcagtgtggtggtggtcacttcattgcccagcacaagagtttgttcttcattgcctacgcgtaccggaataggacggctggcgttattgccgtatgctttggcggtaatcaccaggtcaaatttcttcggcagcggatgcttgtactcgatttttacttcatcgcccagctgcgcgttggaccagcggccccagctctccggacgggaaatcccgctaaactgtttcacctcttctggcgcaccggcgacgttaaagatgaaactgtcggctttgtagcgaatatcgttatcaacaatcttcagcgtatcgacattgcctttgtaacgcgccatgtcgatgaccgtatctttaaatgccgttttgccctgccatgttgttttgtcaacatgctgaacaatttgctgaccgccaagctgcccttggctgacacaccagtcggtggaaagtgccagttccggagcccagagttgtgccatcttgtagcaacggtcaacccagacgaaattgtcgcgtggagcgaaatcggccagctggaaacgcagcggtgcactgtattcgctttccggcagcggttccacgcgtttgtcactaacccgcaacagcagcggcaaacggaaatggctaccgctgaaggcaatcatgtttttctgctggtcgatggtgaactctttcatctctttagggaatttccacaggcggatgatatctggcttccacgccaatgttttctctttgatattgaggaagatttcgctcatgctctgcccggataaactgctacgaccaagtccgagatagttatcgccaccgagaatgtccagcaccgtcgcgccgttatccatcgtgttacgcttcactgccagcgtctcttgctgcggcttgtcgccacgaatgacaaaaaacaggttattgcgatcctgcttattgaggtatttccacgccgtgttgttcatcgctaaatggtcagaagagacgacgatgacggtatctttaaaccacggactcgctttgattttgttgataaacgtcgcgatgttctcctggctgcaacttaccgcgctgaaactctgattcggtttaccgtcaaaatcatattttttgcggttacaggtacgagagataaaaccatccgggtgatgggtatcgactgtcagggtaaacagactgaatcgctgaccactgcgggaaagctcttcaaactttttccacgcttcatcgagaacggtatcgtcgtagaatccccagtcgttgcgatagtgcgggtcggctaccacgcttttcagctcttcactgccgtataagtggtcgaagccatggctcttcaggaacacatctttaccggcaaaacgcagattcgcgccctgcacgaaatagttctgataaccgctgtttttcaggatatctcccagacagatgttctgcgggaagaagctggagacagaggcggaggcgttgccttcaaagggggcaaacagcggtatgccgcactgagaagccaccatgcccgcaatcgtgtaatctgttcccggcagctgctgcgtgtggctgaaatccaggccttcatttttcaacgcgcccagttcaggcgtgagatccgggaaagcctcgttatcaaaataggtccgctcgagactttcgccgtagatataaaccaggttgagtttcgggtcagggatagttttgctcggctctttataataagccgcaaagtccgggtcgccgtcgcgactctgggatttcaccagttccgttatctgacgaaatgccgggctggcgtccacgctacccagcgccagtaagagcgccagcaggctgtaaccaaaatggtgcggatgatggcgacgacggcgcaggatccagcccagcgcaccgaacaccgctgtcagccccagcacaatgccgatacccggcaaaatgtatttgctgacgccagcaccggtcaggctgttggttaaggtatagagaaccgcgtcgttaataccatcgccagtaaaatagtcgctggcaaacagggtgatatttaaaacgacaaatagccccagcaccgttaacgtggctgcaaaccaccaggtgttacgtcccgctttccatgcgtaaatcagcacagaggcgagaaaaagggcgaaagagagtagttcactcaacgggcgatcctcactaaaccgggccgtttagccaacgtttaagctttttgagaagcacaatgtaatggcgtcgccatattgctgcaattctagtgtcaaaaaaatgcgatgttgttaggaattagtttataaacagacttttttgattacggtcacttcccgtgtaacaggggtaaaaccgtccaggagcagggaaaagggcaggagagagccgcgtcagccgggtaacagctaaaacgcggcgtttcgcggttcaggaaatgaagttcagcccctgttttaacaccagatcgcaggctttggttttcaccttttctgccagcggagttgttccgatgttatccagattgagttgctgaccatctttggttttcagcaaaccctgaatgccgtccagatagttggtgtcttctttttgctcttcactgttcaggcccagcttttccagcacctggttcttgatgttttcggcatcggttacgctcgccagcttttgcttcgcgcagtattgcagaatgcctgcggcattgttcatgttatctgcgcttaaggcctggtttccgctgctaagcaagttagttaaactcgcgaggctccaaccgccttcctgtgtcgtgctgttttggttgccaagttcgctggcggcgctggagagcgcatctttccaggacgcagcatgcaccccggtggaaattaatgcgctggcggcaatggcacagcacagaagatgtttaacagttttcatcatcattactcaaggtggaattgtgtcgcagtataccgccagaaacggggattaatactctttacctgttacccggctacggtagctatcccagttgaagatcacccacaaactgttacccaggcgcatacggtccatcacgcgttcgcccagcaacttggtcatctcttccatattactgttggtcagcatcccggttgggcgtttggaagaagagcggcgatcgacgatctggttgatgatcactttttcgtatttgctttcggtctgcacgccgatctcatcgatcaccagcagatcaacgttgctcagatcgttaagcagttgttcttcgctggtaccgctattcctgaaggtatctttcatcgcgctcataatatcggccacggtgatgatcaatacggatttaccgcgtagcagcagctcgttgcagattgccgccgccagatggtttttgccggttcctggcttaccagaaaagatgaagctggcgatgttgccgtcaaactcttcgacatactggcgcgctttgcttaacgcattcatctgcccttcacactcaacgcgatagttctcaaaggaacagttctgatgcagtggacgaataccggagcggttaaaggtgcgctgcattttcatcgcccgattttcacgttcgagagcggcggagcggatcgctccttgttctttttgccaggccagtagttcttcacccgttttgaatgcgggtttgatatgggcaggcatcattttttgcaggcgttgcatcaggtcgccaacgtttttcatcgttaccctctgaatcctggtggaatttggctgtcaggttcgctgaccgtattcacatctcgtttcggcagtccgccgttgctggcacgaccgatttgcaggctgcgcgccagtttttgttgccactgcacatggtgaaagactttaccttccgcctgccagtaggcaatgaaactggccagttcttcggtggtcaccggctctcttagcgccacgccccatagcgccgccaggcggataaaatcggcatcgggttgccagtccggatacatggcgaatttccccatgggtacagcaacgggagcggcttgcggttcctgatagagttgatcgtccagagcgacatcgcttcccggacgcgccagcttttcttccagcgccagcagttcagccaggcgtgcaggcgtgacggcataaaacgccggggcattgttagcaaatacggcaaccacaccgccttcagcttttgccagaacggtttggtgatcgtgtaccagggcgtcaataccaacgacgtccggggtcaaaactctggaagacatactgtttctcaaatatggaacgatgaacgagaagggagataacttttatagtaacacacggaggagaggaggctgtctctcatccgtgtgcttaagcgaggcaattttatacgcgagggcgcttgcggtacaaccataatccaggaatggaaagaccgatggataacgcaccaacaatgctactagctgtaagaaagttggttaacagggtaatcatcaacggttcgctgtaacctaactggctgatttttaccgcgctaatcattgcggtataagcgcttatgcccgggaacatagggataacggccgccacggtaaacactttcggatgcgccagataccagcggctccattgaataccaatggtaccgaccagcatagaagccataaaggtactccactcaatattcaacccgctggtcatcaagatcattcgggaaccatgacctatcgagccaagcagcgcacaccagcgtaacgcccgcacgggaacgttgaacaccatcgcaaagccgaccgcaggaatggcggcgaggatcatatcctgcgccaacgctaacagaaattcgatcacacccatccgcgtagcccccaaatcgtcagtgccatcactacgccgacgcaggtagccagtgtcagcagactggcgatcgcccagcgtgccagtccggtattgatgtggcctttaaacatatcggcgacggcattaatcaacggaaagcccggcactagcagcagaacgctggcggccatcgcaatggtgggggtattgctgaaagtggggagttgcaaaagcaatccggaaatggtggtggcggcgaaagcggtaaggcaaaagttgatctgtggatgaagatgacgttgtgccagcagctggcggatatacatcgcggtcgtactggcaaagaaggtgatgacggcaccatcccagccaccgttattgagtttacagaaacaggcgcaagaaaggccaaccattaaggctaccagccatcttgggtaacgtaatggctgaatttggctaaatcgtttctctacgcctttgtaatccagcagatgatgctccgcaagaatcacaatgtgctggacttcagtcaccacatgcatattaatgccgcgatcgtgatttttacgtgtgcttgtcaggcattgcccatctttaatagttgtcagcactatggcgttgctagagatagaactttcgacgctgtccattcccagtgcccgacccagtcgactggaaagctcatcaaccaacgcgctttccgcaccatgttgcaaaagaaataatccacactggatacaaagccgtgttacggctcgctgttgctcagtttgcataactcgccctttgtcatagacgtgctgcgtattgttcagataatgagaatccatttgtatcatgaagcacggttgttttgcggtaggttaagatcaaaattgcgctgattaatcctggttatcgggagaagctcggtgataaaaagcgaattatctctcgccgcaaacaaactatcacatgaatattatcatcataatgaatttattgtttggcctttacgaatcaggataatagataaccgggcacgttttttaatgttaacaagctaaaaccatcagatttcattgaataaatattggttgtgtgattttgcattctgcgggaagggatatcatttaattataaattaaatgaatgtgatttctgtttttcattaagtattcctaacaacttaatgtagatattttaaatgtctccaggctatttcaccaggttatcatttgatgctaaccttctgacacatgcagtggagttgttgtgcagcaggagtatgctgatatgaaagtgaatgctaaggataatttattcgcttaatctattaatttgctggaaacatttaaggaatgaatatcctgaataaaccatcataatttttagacagtggatgtggaggaaatatgttgccaggatgctgcaaaaatggaattgttatcagtaaaatacctgttatgcaagcagggttaaaagaggtcatgaggactcacttccctgaatatgaaataatatccagcgcctctgcggaggaccttaccttattacaattacgtcgttccggattagtcattgctgatttagccggtgaaagtgaagatccacgttctgtttgtgaacattattattctttaatcagtcaatatcgggaaattcactgggttttcatggtgagtcgctcctggtattcccaggcagtagaactgctcatgtgccctacggcgacgttattgtctgatgttgaacccattgagaatctggtcaagaccgtacgttccggcaatacgcacgcagagcgtatcagcgccatgctgacctccccggcaatgactgaaactcatgattttagctatcgctccgtcattctcactcttagtgagcgcaaggtactgcggctattaggtaaaggatggggcatcaaccagatagctagtttgcttaagaaaagtaataaaactatcagcgcccaaaaaaacagtgcgatgcgtcgactggcaattcacagcaacgctgaaatgtatgcatggataaatagcgcgcagggtgcaagagaacttaacttgccttctgtttatggagatgccgcagaatggaacacagccgaattaagaagagaaatgagccacagttaaaaaaatgcgtcatgagtagtatcggtattgagagtttattcagaaagtttgcgggtaacccttataagctccatacctataccagtcaggagagttttcaggatgccatgagccggatcagctttgcggcggtcattttttctttttctgccatgagaagtgagcgcagagagggattatcttgcctgactgaactggcgattaagtttccgcgtacccggcgtttagttattgcggatgatgatattgaagctcggctgattggtagtttgagcccaagtccgctggacggtgtattaagtaaagcgagtacgctggagatttttcatcaggaactctttttgagtttaaatggtgtacgtcaggcgaccgaccgactgaacaatcagtggtacattaaccaaagccggacgttaagcccgacggagagagaaatattgcgctttatgagccgtggctacagtatgacacaaattgccgagcagcttaaacgcaatatcaaaacgatccgtgcacataaatttaatgtgatgagcaaactgggcgtcagttctgacgcagggttgttggaggccgcagatattctgttatgtatgcggcattgcgaaacaagtaatgtgttgcatccctattaatccgcatgatgccgggtttacttccccggcagtgctttcatttcagcgtacaatcgccacattgctgcacatccggtaagcgataacgctggcagcaagtgcggcgcaccagcaggccgtcgcgcagtaccacggtacgccagagtggattatcttcaccgttcgtgagcgttttctcaaaaaagagggcatggcgcaggctttcaacagtagcctcgccgagcagttgcttcatctcagtgagataccagttgatcaaataaccggtattactccagataagtttgccgttgatctctccggtcgcttctagtgcttgcacaaccggaaccagcgcctggctgattaacgtttccattcgatgctgcgggctatgtggtgttgcgtttttatcttcacacacatcgacccagaaacaggcgacgcgtccggtttcgtgaaactcagcatggaaatgttccgggctcacatctaatgccttttcctgcgtcagtagcgccagcattaatggtggcaccatcaggccgatataccattgtgcccatagactgatcagcggtttgttctcgcggatcatcatcggttggttgcgatagatatgatcggaatagaccgccagcagagaacttagcacattcggactactccattgcgccagcgtcatggcgttaagtggggcaggttcatccaggcggataaactccagcaaatgttcacgatgttttgcgatcgtcgcccgcacggcttgcgcaagcgtgggatcctgcggctggagatgcgttcgccagatgacatcttcatagagcggtgcggaacgataggccataatcgggatagtaatctaaatgataatgattgctaatcatagcgataggtttacccgatagcaagggatttatctggcttgcaaatgataaaaattatcatatgatattggttatcattatcaatgaaagagatgaaatcatgttgcaacgtacgctgggcagtggctggggagtgttgctgccgggattgctgattgcggggctgatgtatgcggatttaagcagtgatcagtggcggattgtcattctgatgggattagtattgacgccgatgatgctgtatcacaaacagttgcggcattacattttgctaccaagctgcctggcacttattgctggcatcatgctgatgataatgaatttgaatcagggatgaaaaatcaaggaagaaacaagaaaggaagtaaagataattggtgcgaggggggggacttgaacccccacgtccgtaaggacactaacacctgaagctagcgcgtctaccaattccgccaccttcgcacagtcatcttactttttttgatatcgcctcgtttggtgcgaggggggggacttgaacccccacgtccgtaagaacactaacacctgaagctagcgcgtctaccaattccgccaccttcgcccagtgcgagcaatatcaacgtggtttttggtgcgagggggggacttgaacccccacgtccgtaaggacactaacacctgaagctagcgcgtctaccaattccgccaccttcgcataccatcaattcttaaaaagaattgctaccacggaggcgcattctagtggttttcagcttttcgtcaatagttaattatcgacagaggtgtaattgctggaaaaatgtccatcaggaaactagcgtgcaggtttggtatgcatgcgggggcagatgccagatgcgacgctggcgcgtcttatctggcctacgaagggctaacgtgcaggttttgtaggtcggataaggcgttcacgccgcatccgacacggtattcggcgagataattaacctttcttcgcctggcgggtcataatggcgcgatacaccttgaagcgccctgtttgcgcgatcacttcgtggaagccaaatgtctcatccagcacgtccggataaggcaggaaggcgttcgctacaattcgcagctcgccgccgctattaagatgacgcaccgcaccgcgaatcagcgtttgcgccgcatccaggctggtttgcatcccatcgtggaacggcgggttggagatgatcatatcaaaacgacctttcacctcggaaaagacgttgctggcaaagacttcaccttcaacaccgttggccgcaagtgttgcgcggctggcttctaccgccggggcagagacatcgcacaaggtgagacgaattttcgggctatggcgcgcaaaggcaacactaagcacgcccgcgccacagccgacatccagcactttacctttcgtgtgcggagttaacgtgctgagcagcaactggctaccgacatccagaccgtcgcggctaaacacgccaggcagcgttttgaccgtcaggccatcgacgctgtattcgccccagaatttctccgcatcaaataccggctgtttttccagacgaccaaaatagaggccacagcgacgagcgctgtcgactttattcaacggcgcataatctgccagcatctgctcggcgctgcgcacgccgctgcggttctcgccaacgacaaaaatatctgtccccactggcagcagagaaagtaaattcatcaactggaactgggcttccggtttgttcttcggccagtagtaaatcagcgtatcgcaatctgcgacgtcatccgccgtggcgaccagactgaaacgggcgttatcccccatctggcggcttaatacctgccagtggtggaattgctgggtatgagcacggctggccgcggtatctaaacgcgcgggcaggtcatcctgtaagtctccggcaaacagaatacggctttgttcgaaatcatcactgtgacgcagcaagacttcacttgccggggtaaatgcagacatggaatgctcctcaattgatactggcggcgattatagccatatgttggcgcggtatcgacgaatttgctatatttgcgcccctgacaacaggagcgattcgctatgacatcccgacgagactggcagttacagcaactgggcattacccagtggagcctgcgtcgccctggcgcgttgcagggggagattgccattgcgatcccggcacacgtccgtctggtgatggtggcaaacgatcttcccgccctgactgatcctttagtgagcgatgttctgcgcgcattaaccgtcagccccgaccaggtgctgcaactgacgccagaaaaaatcgcgatgctgccgcaaggcagtcactgcaacagttggcggttgggtactgacgaaccgctaagtctggaaggcgctcaggtggcaagtccggcgctcaccgatttacgggcaaacccaacggcacgcgccgcgttatggcaacaaatttgcacatatgaacacgatttcttccctcgaaacgactgatttaccggcggcttaccacattgaacaacgcgcccacgcctttccgtggagtgaaaaaacgtttgccagcaaccagggcgagcgttatctcaactttcagttaacgcaaaacggcaaaatggcggcgtttgcgattacgcaagtggtgctggatgaagctacattgttcaatattgcggtcgatcctgactatcagcgtcagggattgggaagggcgctgctggaacatctgatcgacgaactggaaaaacgcggcgtggcgacactatggctggaagtccgtgctagtaacgctgccgccattgccctgtacgaaagtttaggctttaacgaggcgacgattcgccgcaattactaccccaccacggacggtcgcgaagacgccatcatcatggcgttgccaatcagtatgtaatacaaggtggaataatgaagtgggactggattttctttgatgccgatgaaacgctgtttacctttgacagtttcaccggcctgcagcggatgtttcttgattacagcgtcacctttaccgctgaagattttcaggactatcaggccgttaacaagccactgtgggtggattatcaaaacggcgcgatcactagtttacagcttcagcacgggcggtttgagagctgggccgaacggctgaacgtcgagccaggtaaactcaacgaagcctttattaatgcgatggcggaaatctgcacgccgctgccgggcgcggtttctctgcttaacgccattcgtggcaacgccaaaatcggcatcatcaccaacggctttagtgccttgcaacaggtgcgtctggaacgcacgggcctgcgtgattacttcgatttgctggtgatttccgaagaagttggcgttgccaaaccgaataagaaaattttcgattatgcgctggaacaggcgggcaatcctgaccgtagtcgcgtgctgatggttggcgacactgccgagtccgatattctcggtggcatcaacgccgggcttgcgacctgctggctgaatgcacaccatcgcgagcaaccagaaggcatcgcgcccacctggaccgtttctagcttgcacgaactggagcagctcctgtgtaaacactgattgcctcccccccgttgatgggtaaaatagccgcaatttttcgttttcaacaagcgcggcgcgatgccgcttactcaagaagaaagaattatgacgttgtctccttatttgcaagaggtggcgaagcgccgcacttttgccattatttctcacccggacgccggtaagactaccatcaccgagaaggtgctgctgttcggacaggccattcagaccgccggtacagtaaaaggccgtggttccaaccagcacgctaagagcgactggatggagatggaaaagcagcgtgggatctccattactacgtctgtgatgcagtttccgtatcacgattgcctggttaacctgctcgacaccccggggcacgaagacttcagcgaagatacctatcgtaccctgacggcggtggactgctgcctgatggttatcgacgccgcaaaaggtgttgaagatcgtacccgtaagctgatggaagttacccgtctgcgcgacacgccgatcctcacctttatgaacaaacttgaccgtgatatccgcgacccgatggagctgctcgatgaagttgagaacgagctgaaaatcggctgtgcgccgatcacctggccgattggctgcggcaagctgtttaaaggcgtttaccacctttataaagacgaaacctatctctatcagagcggtaaaggccacaccattcaggaagtccgcattgttaaagggctgaataacccggatctcgatgctgcggttggtgaagatctggcacagcagctgcgtgacgaactggaactggtgaaaggcgcgtctaacgagttcgacaaagagctgttccttgcgggcgaaatcactccggtattcttcggtactgcgctgggtaacttcggcgtcgatcatatgttggatggcctggtggagtgggcacctgcgccgatgccgcgtcagactgatacccgtaccgtagaagcgagcgaagataaatttaccggcttcgtatttaaaattcaggccaacatggacccgaaacaccgcgaccgcgtggcgtttatgcgtgtggtgtccggtaaatatgaaaaaggcatgaaactgcgccaggtgcgcactgcgaaagatgtggtgatctccgacgcgctgacctttatggcgggtgaccgtagccacgttgaagaagcgtatccgggcgatatcctcggcctgcacaaccacggcaccattcagatcggcgacacctttacccagggtgagatgatgaagttcaccggtattccgaacttcgcaccagaactgttccgtcgtatccgcctgaaagatccgctgaagcaaaaacagctgctcaaagggctggtacagctttccgaagagggcgcggtgcaggtgttccgtccaatctccaacaacgatctgatcgttggtgcagttggtgtgctgcagtttgatgtggtggtagcgcgcctgaagagcgaatacaacgttgaagcagtgtatgagagtgtcaacgttgccactgcccgctgggtagaatgtgcagacgcgaagaaattcgaagagttcaagcgtaagaacgaaagccaactggcgcttgatggcggcgataacctcgcttacatcgctaccagcatggtcaacctgcgcctggcacaggaacgttatccggacgttcagttccaccagacccgcgagcattaattcttgcctccagggcgcggtagccgctgcgccctgtcaatttcccttccttattagccgcttacggaatgttcttaaaacattcacttttgcttatgttttcgctgatatcccgagcggtttcaaaattgtgatctatatttaacaaagtgatgacatttctgacggcgttaaataccgttcaatgcgtagatatcagtatctaaagccgtcgattgtcattctaccgatattaataactgattcagaggctgtaatggtcgttattcatcactcatcgcttttgtgatggcgaccattgacttctgtagagggtgaagtctctccctattcagcaatgcaacctcgtgttgccaggctcaaattacgagcaaacatacaggaataaatcgatgactatgacaagactgaagattagcaaaactctgctggctgtaatgttgacctctgccgtcgcgaccggctctgcctacgcggaaaacaacgcgcagactaccaatgaaagcgcagggcaaaaagtcgatagctctatgaataaagtcggtaatttcatggatgacagcgccatcaccgcgaaagtgaaggcggccctggtggatcatgacaacatcaagagcaccgatatctctgtaaaaaccgatcaaaaagtcgtgaccctgagcggtttcgttgaaagccaggcccaggccgaagaggcagtgaaagtggcgaaaggcgttgaaggggtgacctctgtcagcgacaaactgcacgttcgcgacgctaaagaaggcagcgtgaagggctacgcgggtgacaccgccaccaccagtgaaatcaaagccaaactgctggcggacgatatcgtcccttcccgtcatgtgaaagttgaaaccaccgacggcgtggttcagctctccggtaccgtcgattctcaggcacaaagtgaccgtgctgaaagtatcgccaaagcggtagatggtgtgaaaagcgttaaaaatgatctgaaaactaagtaattcgtcgtaattcgtcctcccgaactttgtcgggaggcgcgatgtgcaccacactaaaaatatcgcattgagtgattttcacgctcatatcaagcggtgacattaactatggtaaaggagacgcttatgtttcgttggggcatcatatttctggttatcgcgttaatcgccgccgcacttgggtttggtggtctggccggtaccgctgcaggcgcagctaaaattgtctttgtcgtcgggattattctgttcctggtgagtttgttcatgggccgaaaacgaccctaaatttcagaccattaagaaaattttatccaaagccagtccagcggactggcttttgcggttttagcgaataataaattgcgttactttgtcattctttcacaacaaaaacaggaaggcagaggtggggcagcgaatacctgtaacgcttggtaatattgcgccgttgagcctaaggccgttccagcctggacgaatagctctggtgtgcgaaggcggcggacagcgtggaattttcacggctggcgtgctggatgagtttatgcgcgcgcagtttaatcctttcgatctttatctcggcacatctgccggggcgcagaacctcagcgcgtttatctgcaatcagcccggttacgcgcgcaaagtcatcatgcgctataccacaaaacgcgaatttttcgatccattgcgctttgtccgtggaggaaatcttatcgatctcgactggctggtggaggccactgcaagccagatgccgttgcaaatggataccgccgcgcggttgtttgacagcggcaaaagcttttatatgtgcgcctgtcgtcaggatgactacgcgccgaattactttttaccaaccaaacaaaactggctggatgtgattcgcgcctccagtgcgatacctggcttttatcgtagcggagtgagcctggaaggcattaactacctggatggcgggatcagtgatgcgattccggttaaagaggcggcaaggcagggcgctaaaacgttggtcgtcattcgcactgtgccgagtcaaatgtactacacgccgcagtggttcaaacgcatggaacgctggctgggtgacagtagcctgcagccgctggtcaatctggtgcagcatcatgaaaccagctatcgtgacattcagcaatttattgagaaaccaccgggcaagctgcggatattcgaaatttatccgccgaagccattacatagtatcgcgcttggcagtcggattccggcgctgcgtgaagactataaacttgggcgtttatgcggtcgttatttcctcgccacggttggcaagctattaactgaaaaagcgccgcttacccgccatctggtgccagtggtgacgccggaaagcattgtcattccgcctgcgccagtcgccaacgatacgctggttgccgaagtgagcgacgctccgcaggcgaacgacccgacatttaacaatgaggatctggcttgatttgccgttttatcgacacccactgccattttgatttcccgccgtttagtggcgatgaagaggccagcctgcaacgcgcggcacaagcgggcgtaggcaagatcattgttccggcaacagaggcggaaaattttgcccgtgtgttggcattagcggaaaattatcaaccgctgtatgccgcattgggcttgcatcctggtatgttggaaaaacatagcgatgtgtctcttgagcagctacagcaggcgctggaaaggcgtccggcgaaggtggtggcggtgggggagatcggtctggatctctttggcgacgatccgcaatttgagaggcagcagtggttactcgacgaacaactgaaactggcgaaacgctacgatctgccggtgatcctgcatagtcggcgcacgcacgacaaactggcgatgcatcttaaacgccacgatttaccgcgcactggcgtggttcacggtttttccggcagcctgcaacaggccgaacggtttgtacagctgggctacaaaattggcgtaggcggtactatcacctatccacgcgccagtaaaacccgcgatgtcatcgcaaaattaccgctggcaagcttattgctggaaaccgacgcgccggatatgccgctcaacggttttcaggggcagcctaaccgcccggagcaggctgcccgtgtgttcgccgtgctttgcgagttgcgccgggaaccggcggatgagattgcgcaagcgttgcttaataacacgtatacgttgtttaacgtgccgtaagccggataaggcgttcacgccgcatccggcagttggcgcacaatgcctgatgcgacgcttaacgcgtcttatcatgcctacaggtttgtgccgaaccgtaggccggataaggcgttcacgccgcatccggcagttggcgcacaatgcctgatgcgacgcttgtcgcgtcttatcatgcctacaagtctgtgccgaaccgtaggccggataaggcgttcacgccgcatccggcagtcggcgcataatgcctgatgcgacgcttgtcgcgtcttatcatgcctacaggtttgtgccgaaccgtaggccggataaggcgttcgcgccgcatccggcagttggcgcacaatgcctgatgcgacgcttgacgcgtcttatcaggcctacaagtctgtgccgaaccgtaggccgtatccggcatgtcacaaatagagcgccggaaatatcaaccggctcaccccgcgcacctttaacgcatcagccaacggctcaacgtcttccggcgtggcgctcgcccagctttgcgcctcgccatacacgccgtgggcatgaaacgcgttcaggcgtaccggaacatcgccgagtcccttgataaacgccgccagttcttcgatgtgttgcaaataatccacctggccagggatcaccagcaaacgcagttccgccagcttgccgcgctctgccagcaaatagatgctgcgcttaatctgctgattatcgcgtccggtgagttgttgatgacattcgctcccccacgctttgagatcgagcattgcgccgtcgcacaccgggagcaatttttcccagccggtttcgctcaacatgccgttactgtccaccagacaggtgagatggcgcagttgcggatcgtttttgatagcagtaaacagcgccaccacaaacggcagctgggtcgtggcttcaccgccactcaccgttatcccttcgataaacagcactgctttgcggacatggctaagcacttcgtccacgctcatggattgcgccatgggcgtggcatgttgcggacacctcttcaggcaggtatcacactgctcgcaaaccacagcgttccacaccactttgccgtcaacaatctgcaacgcctgatgcggacactgtggcacgcactccccacagtcattgcaacgtcccatcgtccacggattgtgacagtttttgcagcgcagattgcagccctgcaaaaacagagccagacgactgcctggcccgtcaacgcaggagaaggggataatcttactgactaaagcgcatctgctgttcatggcttatcacgcgcggctggcgttccagaatacgagtgttgcgtgcggcttcttcgcccagccaggtggtgttggtgcgactaccttcggcgcgatatttttctaaatcgctcaaacgcaccatataaccggtaacgcgaaccagatcgttaccgctgacattggcggtaaattcacgcattccggctttaaaggcaccgaggcaaagctgtaccagtgcctgcgggttacgtttgatggtttcgtcgagcgtcagaatgtcgctgatgccggaataataataagcatgatgcggggcgacagtttgcagatgggtgatcggatctggctcatcgccatacggcaaacgcgcgcccggcgtggtgccgatatcggaactgatcccgctctgtgcgtgtaacatggcgcgtttttgccagccatatttcacgggggtattggcgacaaactccgccagttgcgcgctgatgcgataacctacttcatttgcggcggcttctttaccgtagcgcgcggcaatcccttctttttcacacagcaagttaaccgcttccgccagcccatacatgccaaacattggcacaaaacgttcagggttaatcagcccttctttcaccaggaagctattctcaaagaagtgactttgttgatagaggaattcacaccgcgcatcgatgatggcgatctgctgctggcagtagtgcggtagagtgcgcgtaaagaagtcatccaggctttcgctgcgctcggcaatggctttcaggttaaggcgtaccagcgtgctgccaccacccgccagcggcagactgttgtaacagctcacaatcccgtagcccccttttgtgaaaattttatcatgcaccggaccgttggcgatgtgcggtttgctacattcacagatgttcttcgccacttccagcagcaggtcatcaggggtgatttcaggatcgtagataaaggtcaggttcggactaacctgcttcaactctgcatctgcacgtaagatcgcgcgggtaatggggctatcagacgggccgatattggcgtgcataaaggcgtctggcagggttctgtcgaggtaacgccagaaacgttttattcgaacatcgatctcgtcttgtgttagaattctaacatacggttgcaacaacgcatccagttgccccaggtagaccggcatgcttgtgacgctcggtacgtggtggtaaagaatggtcagcagagagagtgcgtcatcaagatctttcgcgccttccagctccagccattcggaaccgttcgccagaaaacgggcgtaatcgggtaagacatagcgcggtttgtacggcgcatgaccttcaaacatatcgcagattacaccttcatccagcgcgcggcgggcttcggcaggaagctgtgggtaaggcagattgttttctgcttccagtgccagaaaatggcgcttctgctccgggctaagcactgggctggtgacaatttgctggcaacgttgttgcagtgcattttcatgagaagtgggcatcttcttttccttttatgccgaaggtgatgcgccattgtaagaagtttcgtgatgttcactttgatcctgatgcgtttgccaccactgacgcattcatttgaaagtgaattatttgaaccagatcgcattacagtgatgcaaacttgtaagtagatttccttaattgtgatgtgtatcgaagtgtgttgcggagtagatgttagaatactaacaaactcgcaaggtgaattttattggcgacaagccaggagaatgaaatgactgatctgaaagcaagcagcctgcgtgcactgaaattgatggacctgaccaccctgaatgacgacgacaccgacgagaaagtgatcgccctgtgtcatcaggccaaaactccggtcggcaataccgccgctatctgtatctatcctcgctttatcccgattgctcgcaaaactctgaaagagcagggcaccccggaaatccgtatcgctacggtaaccaacttcccacacggtaacgacgacatcgacatcgcgctggcagaaacccgtgcggcaatcgcctacggtgctgatgaagttgacgttgtgttcccgtaccgcgcgctgatggcgggtaacgagcaggttggttttgacctggtgaaagcctgtaaagaggcttgcgcggcagcgaatgtactgctgaaagtgatcatcgaaaccggcgaactgaaagacgaagcgctgatccgtaaagcgtctgaaatctccatcaaagcgggtgcggacttcatcaaaacctctaccggtaaagtggctgtgaacgcgacgccggaaagcgcgcgcatcatgatggaagtgatccgtgatatgggcgtagaaaaaaccgttggtttcaaaccggcgggcggcgtgcgtactgcggaagatgcgcagaaatatctcgccattgcagatgaactgttcggtgctgactgggcagatgcgcgtcactaccgctttggcgcttccagcctgctggcaagcctgctgaaagcgctgggtcacggcgacggtaagagcgccagcagctactaagtaagatgctttacgcctgatgcgctgcgcttatcaggcctacgagacgtatctacccgtaggccggataaggcgtagacgcatccggcaaaagccgcctcatactcttttcctcgggaggttaccttgtttctcgcacaagaaattattcgtaaaaaacgtgatggtcatgcgctgagcgatgaagaaattcgtttctttatcaacggtattcgcgacaacactatctccgaagggcagattgccgccctcgcgatgaccattttcttccacgatatgacaatgcctgagcgtgtcagcctgaccatggcgatgcgagatagtggaaccgttctcgactggaaaagcctgcatctgaatggcccgattgttgataaacactccaccggtggcgtcggcgatgtgactagcctgatgttggggccgatggtcgcagcctgcggcggctatattccgatgatctctggtcgcggcctcggtcatactggcggtacgctcgacaaactggaatccatccctggcttcgacattttcccggatgacaaccgtttccgcgaaattattaaagacgtcggcgtggcgattatcggtcagaccagtagtctggctccggctgataaacgtttctacgcgacccgtgatattaccgcaaccgtggactccatcccgctgatcaccgcctctattctggcgaagaaacttgcggaaggtctggacgcgctggtgatggacgtgaaagtgggtagcggcgcgtttatgccgacctacgaactctctgaagcccttgccgaagcgattgttggcgtggctaacggcgctggcgtgcgcaccaccgcgctgctcaccgacatgaatcaggtactggcctccagtgcaggtaacgcggttgaagttcgtgaagcggtgcagttcctgacgggtgaatatcgtaacccgcgtctgtttgatgtcacgatggcgctgtgcgtggagatgctgatctccggcaaactggcgaaagatgacgccgaagcgcgcgcgaaattgcaggcggtgctggacaacggtaaagcggcagaagtctttggtcgtatggtagcggcacaaaaaggcccgaccgacttcgttgagaactacgcgaagtatctgccgacagcgatgctgacgaaagcagtctatgctgataccgaaggttttgtcagtgaaatggatacccgcgcgctggggatggcagtggttgcaatgggcggcggacgccgtcaggcatctgacaccatcgattacagcgtcggctttactgatatggcgcgtctgggcgaccaggtagacggtcagcgtccgctggcggttatccacgcgaaagacgaaaacaactggcaggaagcggcgaaagcggtgaaagcggcaattaaacttgccgataaagcaccggaaagcacaccaactgtctatcgccgtatcagcgaataacggtatactgatctgatcatttaaatttgaagcactgagtacggagaacatatgaaacgtgcatttattatggtgctggacagtttcggcatcggcgctacagaagatgcagaacgctttggtgacgtcggggctgacaccctgggtcatatcgcagaagcttgtgccaaaggcgaagctgataacggtcgtaaaggcccgctcaatctgccaaatctgacccgtctggggctggcgaaagcacacgaaggttctaccggtttcattccggcgggaatggacggcaacgctgaagttatcggcgcgtacgcatgggcgcacgaaatgagttccggtaaagataccccgtctggtcactgggaaattgccggtgtcccggttctgtttgagtggggatatttctccgatcacgaaaacagcttcccgcaagagctgctggataaactggtcgaacgcgctaatctgccgggttacctcggtaactgccactcttccggtacggtcattctggatcaactgggcgaagagcacatgaaaaccggcaagccgattttctatacctccgctgactccgtgttccagattgcctgccatgaagaaactttcggtctggataaactctacgaactgtgcgaaatcgcccgtgaagagctgaccaacggcggctacaatatcggtcgtgttatcgctcgtccgtttatcggcgacaaagccggtaacttccagcgtaccggtaaccgtcacgacctggctgttgagccgccagcaccgaccgtgctgcagaaactggttgatgaaaaacacggccaggtggtttctgtcggtaaaattgcggacatctacgccaactgcggtatcaccaaaaaagtgaaagcgactggcctggacgcgctgtttgacgccaccatcaaagagatgaaagaagcgggtgataacaccatcgtcttcaccaacttcgttgacttcgactcttcctggggccaccgtcgcgacgtcgccggttatgccgcgggtctggaactgttcgaccgccgtctgccggagctgatgtctctgctgcgcgatgacgacatcctgatcctcaccgctgaccacggttgcgatccgacctggaccggtactgaccacacgcgtgaacacattccggtactggtatatggcccgaaagtaaaaccgggcagtctgggtcatcgtgaaaccttcgcggatatcggccagactctggcaaaatattttggtacttctgatatggaatatggcaaagccatgttctgatggatttgggcggagcgttgactccgcctttgttatgtcacaaaaaggataaaacaatggctaccccacacattaatgcagaaatgggcgatttcgctgacgtagttttgatgccaggcgacccgctgcgtgcgaagtatattgctgaaactttccttgaagatgcccgtgaagtgaacaacgttcgcggtatgctgggcttcaccggtacttacaaaggccgcaaaatttccgtaatgggtcacggtatgggtatcccgtcctgctccatctacaccaaagaactgatcaccgatttcggcgtgaagaaaattatccgcgtgggttcctgtggcgcagttctgccgcacgtaaaactgcgcgacgtcgttatcggtatgggtgcctgcaccgattccaaagttaaccgcatccgttttaaagaccatgactttgccgctatcgctgacttcgacatggtgcgtaacgcagtagatgcagctaaagcactgggtattgatgctcgcgtgggtaacctgttctccgctgacctgttctactctccggacggcgaaatgttcgacgtgatggaaaaatacggcattctcggcgtggaaatggaagcggctggtatctacggcgtcgctgcagaatttggcgcgaaagccctgaccatctgcaccgtatctgaccacatccgcactcacgagcagaccactgccgctgagcgtcagactaccttcaacgacatgatcaaaatcgcactggaatccgttctgctgggcgataaagagtaattgtgtttcgctgcaaggcgattgccttgtgaagccggagcgggagactgctccggctttttagtatctattcatttttctctccagcttgaatattttcgctatacttttcagtgaaatgtgttaataaatctattcaagtatctattcacgaatctattcattaatgagcgagctgactgatcttttactgcaagggccgcgttctgccccggaattgcgccagcgtctggcaatcagtcaggcgacgttcagtcgccttgttgccagagaagatcgggtgattcgctttggtaaagcacgggcaacgcgatatgcactgctgcgtccttatcgcggaattgagcgtattcccgtctggcgggtggacgataccggaaaggcgcataaattcgccgacatccggttgtgctggccgcagggaagttgtctggtaacaggcgcagatggcgacgaacagtggtttgatggtttgccctggtatttgaccgatctccgaccgcagggctttttagggcgcgcgtggggcaggaagttagccgcgcaactgaatctgactgatgatatacgtctctggcaggaagaagatgtgctctacgccctgaccgtatttaacggtgaatatactggcggttggttggtcggggaggggaattatcagcgatggattactgcacaacaccctgcggaaattcctctggatcaaaaactcacccattacgaacagctggcaagtgatgcactggcaggagaaattgtgggttcttctgcgggcggcgagcagccaaaatttacctactatgcacaaacgccgagtggcaataaacatgtgttggtgaaattcaccgtaccacagcaaaccgcggtcagccaacgttggggtgacctgctaattgctgaatctattgccgcgcaaatcctgcgtgacggtgggatccacgccatcgagagtacggtgcttgtaacaagtaacaggcaggtattcctcgaagcggaacgctttgactgcaaaggtaacgatggtcgcttgcctattgtgagcctggaggcggtgcagagtgagtttatctcttctccgggaagctggccgcaggcaatgcgccgtttgtgtgagcaacaacttgtcactcaccagagcgtggcgcaaacagaagtgatctgggcatttgggcgacttatcgccaacagcgatatgcacgcaggtaatttaagcttttatttatctgaaccgccatttgcgctgacgcccgtctacgacatgctgccgatggtctatgcaccaaacagcgctggaatgctgcgtgatgctgccattgaggtgaagtttgatcttaacgtcagtaaaagcgcttggttaacggcgatcccgctggcgcagcagttctggcaaacggtcgccagagatccgcgtatcagcgaggcgtttcgccacattgcgcaagaaatgccggaaaaaatccggcaaatcgaagagaaagttgcccgcatgggcgggtaattaccttacagcccccgccatccatgcgcttaactcccgtagctctttttcctgttccgggaagtcaaccaacagcgcttcgcactcctgttgcagcatatctgcgcggtacaggcagccttgcagtcgtccggcgagggcttccagcggcgcggggttgaggctgtcggtaaacacctgggcgcgggtgatatggcctttttcaacgtcgaaatgcagttccacgccgccccaggtaaagcgttcatccagcagatggctgaatgccggagcctgaccgaagttccattcccagctactctggcgggcaaaggtttcggcgaagtttggcaagtctggcgttttgttcggggagatgatttccgcttccacgcgctcgccataatgggcgaaaaaggcctcggttatggcctcgcaaacctgctcatgggtgatccccggcaacagctcggtgaggttggtcacgcgggaacgtacgctcgtaatgcctttcgccgccagtttctttttatccggattgagatagtttgccaggcggctgaggtcggcattgagtagcaaggtgccgtggtggaagccgcgatctttggtttcgcgataggcgctgccactgactttgcggtcgccttcgacggttttcaccaccagatcgttacgtccggacgcttcggcgctgacgccgagcgcgttcagcgcattgagcacaatgctcgtggagatagttttatcgtactccggcttgccagccataaaggtaaagcaggtattgccgagatcgtggaacaccgcgccgccaccgctactgcgccgcgccaggcggacgttatcttcttccatccgccgggtattacactctttccacgggttctgcgcgcgaccaattactaccgtgtcggcattgcgccagagaaacagaacgcgctgcgtggcgggcatttggcgaaaaatacactcttccaccgccaggttaaaccacgggtcgtaagagtcagagatgagcaggcgtaatgtggacataacgatttcctttcttgtagtaatgggtcactcttttttctcgctttcttcctcttccggcaccggtttgctggcggctaacaggaaggggctttgctgccagcgggtgcgtttaccctgtagcagcgtgcgggtcagcactacaccgattgccagactgagcagcaacatcaggcgtaaaatgttagtggtgttatccacctgttgggcttcggtggcgagcgtatgggtgtcgagtgtcaggcgcagatagccgagcggtccgtttttacccgcaattggctcgacaatctgctggttaaaatagccgcctgcttttttaccgtcgagcgccagccggtcgcgcacttcgacgctttcgccagaacgtgcgataagatcgccttgttcgtcatacacacccgcgtcgaggatacggctttcatccgttaactgatcgaggatcgcctgaatgcgtttttcatccggactgtcggtacgcatcagcggtgcaacgttcagcgtcacctgacgcgccagggtgcgggccagttcttccagctgtggattacgctgtcgctggtggttttgactaaaccaactcgctccctgcatcagcgccactaacaaggcaagacagaacaggacaatcactgcccgatgcagccggaatttcagttttgtgcgagccatcttccaccctttgaaaatttgagacttaatgttgccagaagcaatggatacaaggtagcctcatgcgttattttccctgcttcgaacgattttacaggagccttaatgcctaacattacctggtgcgacctgcctgaagatgtctctttatggccgggtctgcctcttagtttaagtggtgatgaagtgatgccactggattaccacgcaggtcgtagcggctggctgctgtatggtcgtgggctggataaacaacgtctgacccaataccagagcaaactgggtgcggcgatggtgattgttgccgcctggtgcgtggaagattatcaggtgattcgtctggcaggtagtctcaccgcacgggctacacgcctggcccacgaagcgcagctggatgtcgccccgctggggaaaatcccgcacctgcgcacgccgggtttgctggtgatggatatggactccaccgccatccagattgaatgtattgatgaaattgccaaactggccggaacgggcgagatggtggcggaagtaaccgaacgggcgatgcgcggcgaactcgattttaccgccagcctgcgcagccgtgtggcgacgctgaaaggcgctgacgccaatattctgcaacaggtgcgtgaaaatctgccgctgatgccaggcttaacgcaactggtgctcaagctggaaacgctgggctggaaagtggcgattgcctccggcggctttactttctttgctgaatacctgcgcgacaagctgcgcctgaccgccgtggtagccaatgaactggagatcatggacggtaaatttaccggcaatgtgatcggcgacatcgtagacgcgcagtacaaagcgaaaactctgactcgcctcgcgcaggagtatgaaatcccgctggcgcagaccgtggcgattggcgatggagccaatgacctgccgatgatcaaagcggcagggctggggattgcctaccatgccaagccaaaagtgaatgaaaaggcggaagtcaccatccgtcacgctgacctgatgggggtattctgcatcctcagtggcagcctgaatcagaagtaattgctcgcccgccatcctgcgggcggcacagcattaacgaggtacaccgtggcaaaagctccaaaacgcgcctttgtttgtaatgaatgcggggccgattatccgcgctggcaggggcagtgcagtgcctgtcatgcctggaacaccatcaccgaggtgcgtcttgctgcgagcccaatggtggcgcgtaacgagcgtctcagcggctatgccggtagcgccggggtggcaaaagtccagaaactctccgatatcagccttgaagagctgccgcgtttttccaccggatttaaagagttcgaccgcgtactaggcggcggcgtggtgccaggaagtgccattctgattggcggtaaccctggtgcggggaaatccacgctgctactgcaaacgctgtgcaaactggcccagcagatgaaaacgctgtatgtcaccggcgaagagagcctgcaacaggtggcaatgcgcgctcatcgccttggcctgccgactgacaatctcaatatgttgagcgaaaccagcatcgaacagatctgcctgattgccgaagaagagcaaccgaagctgatggtaattgacagcatccaggtgatgcatatggcggatgtacagagtagccctggtagcgtggcgcaggtgcgtgaaacggcggcttatttgacacgcttcgccaaaacgcgcggtgtggcgattgtcatggtggggcacgtaaccaaagatggtagcctggctggcccgaaagtgctggaacactgtatcgactgtagcgtgcttttggatggcgatgccgactcccgttttcgcaccttgcgcagccataaaaaccgcttcggcgcggtgaatgagctgggcgtcttcgcgatgaccgaacaggggctgcgtgaagtcagcaaccctagcgcaattttcttaagtcgcggcgatgaagtgacctccggtagcagtgtgatggtggtatgggaaggaacgcgtccactgctggtggagattcaggcgctggtcgatcacagcatgatggcgaacccacgccgcgtggcagtggggctggaacaaaaccgtctggcaatcctgctggctgtgttgcaccgtcacggtggtctgcaaatggccgatcaggatgtgtttgtgaacgtggtcggcggcgtgaaggtaaccgaaaccagtgccgacttagcgttactgctggcgatggtttccagcctgcgcgacagaccgctgccgcaggatctggtggtgtttggtgaagtcgggctggcaggggagatccgcccggtgcccagcggtcaggaacgaatctctgaagcggcgaaacacggttttcgccgggcgattgttccggcggctaacgtgccgaaaaaagcgccggaagggatgcagatttttggcgttaaaaaactctccgacgcgcttagcgtgttcgacgacttataatgagatatacggagggagatatgagcagttttgattacctgaaaactgccatcaagcaacagggctgcacgctacagcaggtagctgatgccagcggtatgaccaaagggtatttaagccagttactgaatgccaaaatcaaaagccccagcgcgcaaaagctggaggcgttgcaccgttttttggggcttgagtttccccggcagaagaaaacgatcggtgtcgtattcggtaagttctacccactgcataccggacatatctaccttatccagcgcgcctgtagccaggttgacgagctgcatatcattatgggttttgacgatacccgtgaccgcgcgttgttcgaagacagtgccatgagccagcagccgaccgtgccggatcgtctgcgttggttattgcaaacttttaaatatcagaaaaatattcgcattcatgctttcaacgaagagggcatggagccgtatccgcacggctgggatgtgtggagcaacggcatcaaaaagtttatggctgaaaaagggatccagccggatctgatctacaccagcgaagaagccgatgcgccacagtatatggaacatctggggatcgagacggtgctggtcgatccgaaacgtacctttatgagtatcagcggtgcgcagatccgcgaaaacccgttccgctactgggaatatattcctaccgaagtgaagccgttttttgtgcgtaccgtggcgatccttggcggcgagagcagcggtaaatccaccctggtaaacaaacttgccaatatcttcaacaccaccagtgcgtgggaatatggccgcgattatgtctttagtcacctcggcggtgatgagatcgcattgcagtattctgactacgataaaatcgcgctgggccacgctcaatacattgattttgcggtgaaatatgccaataaagtggcatttatcgataccgattttgtcaccactcaggcgttctgcaaaaagtacgaagggcgggaacatccgttcgtgcaggcgctgattgatgaataccgtttcgatctggtgatcctgctggagaacaacacgccgtgggtggcggatggtttacgcagcctcggcagtagcgtggatcgcaaagagttccagaacttgctggtggagatgctcgaagagaacaatatcgaatttgtgcgggttgaagaggaagattacgacagtcgtttcctgcgctgcgtggaactggtgcgggagatgatgggggagcagagataaccgtgatgaaactgctcaaaggcgaggtataaaatgagtttttttgatgagttgaaaacctctctggaagaggctgtcgagattaaacaaggtttgaaaaaacctgcacgggtgacccgccacgaaattgaggatgctaaggctgttgtagaccggaaacggtgttcacgccgcatccggcattcggtgctcaatgcctgatgcgacgcttaccgcgtcttatcaggcctacagttttacaacgtattgaaattgctggttttgtaggccggataaggcgttcgcgccgcatccggcattttacgcattacttcgcaatacgcttgtacttgatacgcttcggctccagcgcgtctgcgcccagcgtgcgtttcttgtactcttcgtactcggtaaagttaccttcgaagaactcaactttaccttcatcctggtaatccagaatgtgcgtggcgatacggtcgaggaaccaacggtcgtggctgataaccatcgcacagcccgggaactccagcagggcgttttccagcgcgcgcagggtttcgatatccaggtcgttggttggttcgtcgagcagcagcatgttgccgccaacctgcagcagcttcgccagatgcagacgaccgcgctcaccaccggagagttcaccaacgcgtttaccctgatcaacccctttaaagttaaagcggccaacgtaggcgcggcttggcatctcggtgttgccgatcttcatgatatccagcccgccggaaacttcttcccaaacggttttgctgttatccatactgtcacggaactgatcaacgctcgccagtttcaccgtttcacccaaagtgatggtgccgctgtccggctgttcctgaccagagatcatacggaacagggtgcttttacccgcaccgttcggaccgatgatcccgacgatcgctcctttcgggatgctgaagctcaggtcatcaatcagcagacgatcgccataggatttacgcaggttgctgacttccagcactttatcgcccagacgcggtccaggtggaataaacagttcgttggtttcgttacgtttctgatattcggtgctgttcagttcttcaaagcgcgccagacgtgctttacctttgctctgacggcctttagtaccttgacgtacccattccagctctttctcaatgctcttacgacgcgccgcttcttgactagcttcctgcgccaggcgctgatctttctgctccagccaggaggagtagttaccttcccacggaataccttcaccgcggtcaagttcgaggatccagcctgcaacgttatcgaggaagtaacggtcgtgggtaatcgccacaacggtgccttcgaagtcgtgcaggaagcgttccagccaggccacggattcggcatccaggtggttggtcggttcgtcgagcagcagcatgtctggtttttccagcagcaggcggcacaacgctacgcgacgacgttcaccaccggagaggttagcgattttcgcgtcccagtccggcagacgtagcgcatccgccgcacgctccagctgtacgttcagattatgaccgtcgtgagcctgaatgatctcttccagacggccttgttcagcggccagcttgtcaaaatcggcatccggatcggcgtacagcgcatacacttcatccaggcgtttcagggcgttaaccacttcactaaccgcttcttcaatggactcacgcacggtgtgttccgggttcagctgcggttcctgcggcagataaccaatcttgatgtctggctgcggacgcgcttcaccttcgatgtctttatcaatgcccgccataatgcgcagcagggtggacttacccgcgccattcagacccaggacaccaatttttgccccagggaagaaactcagagagatgtttttcaaaatatgacgtttcggcggaacaactttgccgacacgatgcatggtataaacgaattgagccacgttggacttcgcctctatgtttatcgtgataatgagttttcaaaggcgaagtgtagcctttttccccgcctaatcccagccggtcgatcaccctcgcagtaaaagtaaaaaagtgtccgtaacgtggcgtaaacggcaatgactggttagcataaatctattacgcggcatgacgctgcattgatgtatttacacttagaggatgcgcttgtggaaaaagccaaacaagttacctggcggctgttggctgccggtgtctgtctgctgacggtcagcagcgtggcgcgagccgacagtctggatgagcagcgtagtcgttacgcgcaaatcaagcaggcctgggataatcgacaaatggatgtggtcgaacaaatgatgcctggactgaaggattatccgctttatccctacctggaataccgccagatcaccgatgatctgatgaatcaaccggcggtgacggtcactaactttgttcgcgctaaccccacgcttcctcccgctcgcacgctgcaatctcgtttcgtcaatgaactggcgcggcgtgaagactggcgtggcttgttagcctttagcccggaaaagcccggaactaccgaagcgcaatgtaattactactatgcgaaatggaacaccgggcagagtgaagaagcctggcaaggggcgaaagagctgtggctaaccggcaagagccagcctaacgcctgtgacaagttatttagcgtctggcgtgcgagtggtaaacaagatccgctggcgtatttagagcgtatccgtctggcgatgaaagcgggtaacacaggcctggtaacagtgctggcagggcagatgcctgccgattaccagactatcgccagcgcaatcattagtctggcgaacaaccctaatacggtactgaccttcgcgcgtacaactggcgcgaccgattttacccgtcaaatggcggcggtggcgtttgccagtgtggcgcggcaggatgctgagaatgcacggctgatgatcccaagccttgcccaggcgcagcagcttaatgaagatcagattcaggagctgcgcgatatcgtcgcctggcgtttgatgggcaacgatgtcaccgacgagcaggcgaaatggcgcgatgacgccattatgcgcagccaatctactagccttattgaacgccgtgtacgaatggcgcttggcaccggcgatcgtcgcggcctgaatacctggctggcgcgtctgcctatggaagcgaaagagaaagatgaatggcgttactggcaggcggatttattgctggaacgcggacgtgaagctgaagcaaaagagattttgcatcaactcatgcaacagcgtggtttctacccgatggttgcagcacaacgcatcggcgaagagtatgagctgaagattgataaagcgccgcagaatgttgacagcgccctgactcaggggccggagatggcgcgcgtgcgcgagttgatgtactggaatctcgataataccgcgcgtagcgagtgggccaatctggtgaagagcaagagtaaaacagagcaggctcaactggcgcggtatgctttcaacaaccaatggtgggatcttagcgttcaggcaacgatcgccgggaagctgtgggatcatctggaagagcgattcccgctggcttacaacgatcttttcaagcgctacaccagcggtaaggagatcccgcaaagctatgcgatggcgattgctcgtcaggagagcgcctggaatccgaaagtgaaaagtccggtaggggccagcggcttgatgcagattatgcctggtacagcgacccatacggtgaagatgttctctattcccggttatagcagtcctgggcaattgctggatccggaaacgaatatcaacattggcaccagttacctgcaatatgtttatcagcagtttggcaataatcgtattttctccagtgcagcttataacgccggaccagggcgggtgcgaacctggcttggcaacagcgccgggcgtatcgacgcagtggcatttgtcgagagtattccattctccgagacgcgcggttatgtgaagaacgtgctggcttatgacgcttactaccgctatttcatgggggataaaccgacgttgatgagcgccacggaatggggacgtcgttactgatccgcacgtttatgatatgctatcgtactctttagcgagtacaaccgggggaggcattttgcttcccccgctaacaatggcgacatattatggcccaacaaagtccctatagtgcagcgatggcagaacagcgtcaccaggagtggttacgttttgtcgacctgcttaagaatgcctaccaaaacgatctccatttaccgttgttaaacctgatgctgacgccagatgagcgcgaagcgttggggactcgcgtgcgtattgtcgaagagctgttgcgcggcgaaatgagccagcgtgagttaaaaaatgaactcggcgcaggcatcgcgacgattacgcgtggatctaacagcctgaaagccgcgcccgtcgagctgcgccagtggctggaagaggtgttgctgaaaagcgattgattttgtaggcctgataagacgtggcgcatcaggcatcgtgcaccgaatgccggatgcggcgtgaacgccttatccgtcctacaaatacccgtaatttcaatatgtttggtaggcatgataagacgcggcagcgtcgcatcaggcgcttaatacacggcattatgaaacggactcagcgccaggatcaccgcctggtgatagacgctggcgcgagtgagtttcccggcggtaaacacgccgatcgccccttccttacgaccaatctcatcaataccggtataacggctcatcacgggaccaagcgcctcaccttcacgcactttttccagaatcaccgcaggcaacggcaaagtagcgctacgcgcctcgccgcgctggctggcgttttcaatcaccacccaactgaaagtgctgtcaccatcgatgccagcttcaatcgccacccaaaaatcagcctctggaagtaaacggcgggcattggctacccgatttcgtgcgccagcgcgcgtttcctcactgccaaagggctgttccggtacaccgctctcgacggcaacggatgcaatatggcaggatccttcgccgaagatctcgtgaaatgcctgcagaatggcctgaattttagcgggattggtggtcgcacagacaacttggtgcataatcagcattactcagaaaattaacgttacagcagtatacggaaaaaagcatgttacaggtatacctagtccgccacggtgaaacgcagtggaacgccgagcgacgtattcagggccagtctgacagcccgctgaccgccaaaggtgagcaacaggcgatgcaggtggcaacccgtgccaaagagcttggcattacgcatatcatcagtagcgatttaggacgcacccggcgtacggcggaaatcatcgcccaggcctgcggctgtgacatcatctttgattctcgcctgcgtgaattaaacatgggtgtgctggaaaaaagacatatcgattctctgaccgaagaagaagagaactggcgtcggcagctggtcaatggcaccgttgacgggcgtattcctgaaggcgagagtatgcaggagctcagcgatcgcgtcaatgcggcactggaatcttgccgggacttaccgcagggaagccgaccgctgctggtgagtcatggtattgcactgggatgcctggtgagtacgattctcggattaccagcatgggcagagcgccgcttacgtctgcgtaactgttctattagccgcgtggattatcaggaaagcctgtggctggcgtctggctgggtcgttgaaaccgcaggggacatcagccatctggacgcccctgcattagatgagctgcagcgttaacgacggatcggaatcagcagttcacagcgtagattaattgggcgatctcccgctttggcatcttctgccgggtagtatcgctcaatatcctgacctttacggcgcgtcaggttgagcattggcatgcacgttccgtataccgtcaggataaactcctgcacgccggttcccagaccttcataggtaaacatcacatattcgccgccctgcagcatcaccggatgccccgtcagtacatagccatctgcctgatcctgggctaacgcggtggtatagaatacctcttgctcgtcgtctttatcctgactcggacgcgtttcattcaggccgtagagcaccggcggaatggtcggcgcgttgccgagaaaatcgtgccagaactgataacgcatttcatggcggaaatcagagatttgctccaggctacaggagtagctctgggtaacaccaatcagcggcgtatcttccagggtgacaaatttgtgctctggcatagtgaattcacccaggcgtagcggcgggcgaataccaaaggcgctccattcaggagaacggcggtaaagtgcaggagtctgggcaaactgcttcttgaatgcgcgggtaaatgtctgttgagagtcgaagcggtattgcagcgcgatgtccagaatcggacgcgcagtcaggcgtagtgcgaccgcgcttttgctcaaacgacgagcacgaatatacgcgccaatagcatggccagtgacatctttaaacattctctgtaagtgccacttggaataacctgctttcgccgctacattgtcgaggctcaggggctgatccagatgaccttccagccagattaaaaggtcgcgaataatgccggcctgatccataaaatatcctcatcctttcaacaacgagcacctgacatcaggtaattggataatagcattttttgctgttttagcattcagtgtttttttcttagtagagtatgttttagggcttgacggaaataaaagtattgagattttgttcttaatcaatatgttatttaccgtgacgaactaattgctcgtgtaatagataaaaatggtaacaatatgaaatacaagcatttgatcctgtctttaagcctgataatgctggggccattggctcatgcagaagagattggtagcgtcgacaccgtatttaaaatgatcggcccggatcacaaaattgttgtggaagcctttgatgatcccgatgtgaaaaatgtcacctgttatgtgagccgggcgaaaaccggtggtattaaagggggattgggtctggcggaagatacctccgatgcggccatttcttgtcagcaagtcgggccgattgaactgagcgatcgtattaaaaacggcaaagctcagggcgaggtagtattcaaaaaacgcacgtccctggtctttaagagcttacaggtcgtgcgcttttatgatgccaaacgcaacgcgctcgcttatctggcttactccgacaaagttgtagaaggtagcccgaaaaacgcgattagcgcggttcctgtcatgccgtggcggcaataacagaggcgatttatgcaacgggaaacggtctggttagtggaagatgagcaagggatagccgacacgctggtctacatgttgcagcaggaaggttttgccgtcgaggtctttgagcgaggcttgccggtgctggataaagctcgcaagcaggtacccgacgtcatgattctcgatgttggtctgccggatattagcggctttgaattgtgccgccagttactggcgctccatccggcgttacctgtactgttcctgacggcccgaagtgaagaggtcgatcgcctgcttgggctggaaattggtgctgacgactacgtggctaaaccgtttagtccccgcgaagtgtgcgccagggtgcgcaccttactgcgtcgggtgaagaagttcagcacgccgtctcccgtcatccgtattggacattttgaattgaatgaacccgcggcgcagatcagctggtttgacacgccattagcgctgactcggtatgagtttttattgttgaagacgttactcaagagtccgggccgcgtctggtcccgccagcaactgatggatagcgtatgggaagatgcgcaggacacctacgatcgcaccgtcgatacccacattaaaacgctgcgtgccaagctgcgcgccatcaaccccgatcttagtccgattaatactcatcgcggcatgggatatagcctgaggggcctgtaatgcgtatcggcatgcggttgttgctgggctattttttactggtggcggtggcagcctggttcgtactggccatttttgtcaaagaagttaaaccgggcgtgcgaagagcaacggaggggacgttgatcgacaccgcaacgttgctggcggagctggcgcgtcccgatttgctctctggggacccaacgcatgggcaactggcgcaggcgtttaatcagctacaacatcgcccgtttcgcgccaatatcggtggcattaacaaagtgcgcaatgaatatcatgtctatatgaccgatgcgcagggcaaagtattgttcgatagcgcaaataaagccgttggacaggattatagccgctggaatgacgtctggctaacgttgcgtggtcagtatggtgcgcgcagcacgttgcaaaatcctgccgatcccgaaagttctgtgatgtatgttgccgcaccgattatggacggcagccggcttattggcgttttgagcgtaggcaaaccgaacgcggcgatggctccggtcattaagcgtagcgagcggcgaattttatgggccagcgccattttgttggggattgcactggtgattggcgcaggcatggtttggtggatcaaccgctctattgcccggctcactcgctatgctgattccgtcactgacaataagcccgttcctctccccgatctcggtagtagcgagttgcgtaaactcgcgcaggcgctggaaagtatgcgcgtgaagctggaagggaaaaactatattgagcagtatgtttacgcattaactcatgagctaaaaagcccactggcggcgattcgtggagcggcggaaattttacgcgaaggtccgccgccggaagtggtggctcgttttactgacaacattctgacgcaaaatgcgcgtatgcaggcattggtagaaacgttactacgccaggcaagactggagaatcgtcaggaagtcgttctgactgctgttgatgtggcggcattattccgccgcgtcagcgaagcgcgcaccgtgcagttggcagaaaaaaaaatcactctgcatgttacgcccaccgaggttaacgttgctgctgaaccggcgttactggagcaggcgctgggaaatttactggataacgccatcgattttacccccgagagcggttgcatcacgctaagcgccgaagtggatcaggaacacgtcacgcttaaggtgctggataccggtagtggtattcctgactacgcgcttagtcgtatttttgaacgcttttactctttgcctcgtgcaaatgggcaaaaaagcagcggtctggggttggcgttcgtcagtgaggtcgcccgtttgtttaacggcgaagtcacgctgcgcaacgtgcaggaaggtggcgtgctggccagccttcgacttcaccgtcacttcacataacttcaaattcttcccacatagtcttcgtatcctgctgccattgcaaaggagaagactatgttgaaatcccccctgttctggaaaatgactagcctgtttggtgcagtattgctgttgttgattccgataatgctgattcggcaggtgattgtcgaacgtgctgattaccgtagcgatgtggaagatgcgattcgccaaagtaccagcgggccgcaaaaactcgttgggccgctcatcgctattcctgtgaccgagctttatacggtgcaggaagaggataaaaccgtggagcggaaacgaagttttatccatttttggttacctgagagtttgatggttgatggcaatcagaacgtggaagaacgcaagatagggatttataccggtcaggtctggcacagtgatttaacgttaaaagccgatttcgatgttagccgtcttagcgaactcaacgcgccaaatatcaccttaggcaagccatttattgtgattagcgtcggggatgcgcgtggtattggtgtggtgaaagcgcctgaagttaacggaacggcgctgaccattgaacccggcaccgggttagagcaaggcgggcagggcgtgcatatccctttacctgaaggggactggcggaagcagaacctgaagctgaatatggccctgaatttaagcggtaccggcgatctttctgtggtgcctggcgggcgtaatagcgaaatgaccttaaccagcaactggccgcatcccagttttttaggtgattttctaccagccaaacgggaagttagcgagagtggttttcaggcgcactggcaaagcagctggtttgctaataatctcggtgagcgttttgctagtggcaatgataccggctgggaaaacttcccggcgtttagcgtcgcagtaacgacgccagccgatcaataccaattaactgaccgggcgactaagtacgccattctgctgattgcactgacttttatggcgttctttgtttttgaaacgctcaccgcgcaacgtttacacccaatgcaatatttgctggtggggcttagtttggtgatgttttatttgctcttgctggcgctttctgaacataccggttttaccgtggcatggataatcgccagtctgattggggcgataatgaacggtatttatttgcaagcggtattgaaaggttggtgcaacagcatgttgtttaccctcgcgctgttgttgctggatggtgtgatgtggggactgctcaactctgccgatagcgcgctgttgttgggaaccagtgtgctggtggtggcgctggccggcatgatgtttgtgacccgtaatatcgactggtatgcgtttagtctgccgaaaatgaaagccagtaaagaagttacaacggacgatgagttacgtatctggaaataaggttgaaaaataaaaacggcgctaaaaagcgccgttttttttgacggtggtaaagccgattaatcttccagatcaccgcagaagcgataaccttcaccgtgaatggtggcgatgatttccggcgtatccggcgtagattcgaaatgtttacgaatacggcggatcgtcacgtctacagtacggtcgtgcggtttcagctcacggccggtcattttcttcagcagttcagcacgggactgaattttgcctgggttttcacagaagtgaagcatggcgcggaactcgctgcgcggcagcttgtactgctcgccatcagggccgatcaagctacggctgttgatgtccagttcccaaccattgaacttgtagctttcaacgctacgacgttcttcgctgacagtacccagattcatggtacgggacagtaggttgcgtgcacgaatcgtcagttcacgcgggttgaacggtttggtgatgtagtcatctgcaccgatttcgaggccgagaattttatcgacttcgttgtcacggccagtcaggaacatcaacgcaacattcgcctgctcgcgcagttcacgcgctaacagaagaccgttcttacccggcagattgatatccatgatcaccaggttgatgtcatattcagagaggatctgatgcatttccgcgccatctgtcgcttcgaaaacatcatagccttccgcttcgaaaatacttttcaacgtgttgcgtgttaccaactcgtcttcaacgataagaatgtgcggggtctgcatgtttgctacctaaattgccaactaaatcgaaacaggaagtacaaaagtccctgacctgcctgatgcatgctgcaaattaacatgatcggcgtaacatgactaaagtacgtaattgcgttcttgatgcactttccatcaacgtcaacaacatcattagcttggtcgtgggtactttccctcaggacccgacagtgagtaaaacggctgtcatcctaaccattttaacagcaacataacaggctaagaggggccggacacccaataaaactacgcttcgttgacatatatcaagttcaattgtagcacgttaacagtttgatgaaatcatcgtatctaaatgctagctttcgtcacattattttaataatccaactagttgcatcatacaactaataaacgtggtgaatccaattgtcgagatttattttttataaaattatcctaagtaaacagaaggatatgtagcattttttaacaactcaaccgttagtacagtcaggaaatagtttagccttttttaagctaagtaaagggctttttctgcgacttacgttaagaatttgtaaattcgcaccgcgtaataagttgacagtgatcacccggttcgcggttatttgatcaagaagagtggcaatatgcgtataacgattattctggtcgcacccgccagagcagaaaatattggggcagcggcgcgggcaatgaaaacgatggggtttagcgatctgcggattgtcgatagtcaggcacacctggagccagccacccgctgggtcgcacatggatctggtgatattattgataatattaaagttttcccgacattggctgaaagcttacacgatgtcgatttcactgtcgccaccactgcgcgcagtcgggcgaaatatcattactacgccacgccagttgaactggtgccgctgttagaggaaaaatctagttggatgagccatgccgcgctggtgtttggtcgcgaagattccgggttgactaacgaagagttagcgttggctgacgttcttactggtgtgccgatggtggcggattatcctagcctcaatctggggcaggcggtgatggtctattgctatcaattagcaacattaatacaacaaccggcgaaaagtgatgcaacggcagaccaacatcaactgcaagctttacgcgaacgagccatgacattgctgacgactctggcagtggcagatgacataaaactggtcgactggttacaacaacgcctggggcttttagagcaacgagacacggcaatgttgcaccgtttgctgcatgatattgaaaaaaatatcaccaaataaaaaacgccttagtaagtatttttc
